United States Patent Application Publication US 2024/0065297 A1 - sequence listing, part 8

SEQ ID NO: 22 - DNA, 2426651 bp, Pichia kluyveri
  >NCYC246_000001F P_kluyveri_NCYC246_TS
gctttataacatgcatgcataatattcaaaaatatcacctgattacataatatgatctactacttgaattaataattccaaaagtcggcagtgttggatcccgcaataaaaaaacctttcaggctgtgcaccgtagtttgtcagctttaataatcgatgatctcttattaattctcttattactgtggttgattcattatttttttagtataaataattacaaattgtggttcaaattgagacagtatttctcattgacatcaaatggttgaataaatgaatcttgatataaatactagtcatattctcattactttaatcatcattttaatgtctatattttataaaattttaaattctgcaaataaatcatcgacaagactaattgataacattaaaaatataactatggctgaatctgaacatttcgtatttaatgaatctccatcaaagaaaccattaccaattttctttttctctcatggtggaccagattttgctgatggtcttgataatccaggtgcttgggaaacaactaaaaaagttggtagatatattcaaaataaagttaaacctgattttattatagttgtatcagctcattggcaaacaactaaacccgatgaaattgaagttgcattacctggtattggtgaagcttggtatacccaaaattctgtaacttctaaaaaaattagatctgatgaaaatggtttaatttatgattattatggatttcctaaaagattttatgaaactcaatttcatacagttcccaataaatttattgccaatgatattgttaaaactttaaaagaatcagattggttccaatctaaaactcaagaaagaggtattgatcatggtgttttcgttcctttaaaagttgcttttggtgatccaactattgcagattcaaataaattagatgttgaagtaccattaattcaagtttcacttgcaggtacttctgatattgaaattcattatagattaggtgaagctttaagtaaatatagagatttaaatggtgcaattttattctctggtatgtcagttcataatttaagagatcatcatatggctagagctttaggtaataaaccattacattataataaaccattccatgaaattataaataaacttttacttgatacaaaacatgaagatcaattagaggcattgaaacaattaccaagaaatccagaatggaaagaaatatataaagctgctcaccctacaaatgaacatcttttacctgctattgttgcagcaggtgcatcaagaggtgatgaatgtaaacttctttatggtgatgaagcaggttcattaggttggaatatttacagttggggttcaactgatggtttagatatttaattatgtattattctctaagatttctataaaacgttaaagttgttattaattaatacttcccatcaaaaccttatttttaaattatagataatcctcaattatatagtacttctgtgatgataaagtgagttaacagtaagtttaatttaagtgaatcatcaataatttattacgtaatcagttttttgaattgtctcacccttgtttcatgttggtggcagaacgttaacatgatggttttgcaataattagatctttgtagaactgtaaaatacctctggtaaacaatcattagtattacaataccatatacccagatgtatgagatttaacataatgataatgctttactaacagtctttctttgagtaattgcattctttataccctattatcaactaatgacaacaacgtttactcatccgtctaccattgagacaaactattacagaagaccatatttgaatttcaaagagaaattaacacaactattgctgaatccatatactgtatttttattgcttttcattataaaactattatttttcttaaattcattagttaattcattagaacaagctaaatctcaaactcatgcattatatgattcaatagatatatacgcatctgatattgtttcattcccacattatatatcaaaagcttcaaatcttatgattgctaaatctatagaatctgcaaatcatggcttaatgaaaactctgactttaatgattactgcaagtgaagaattaataatgttcataattgaattatcagttggtacttatgcttgtttgttaaccgcagttattgatgatactgttatggtagcattgaatgcaactgagagtgttataactactgcaaatgatactttgatttcatttgcaaaggaattaaatgttgggttaggtgatttatcagatgtaataaatgatgtgatacatacagctgatgatacgggtgatgcattaaaacatttatttaaaagtggtggcaagactaatcaacaatctaatttagatgaacaattaaataaagttaatttaactatcaaaaatatgcaagattggcaaatacctggtagtattaatgataaaattgaagatttaaaggataaaatacctgattttactgatgttcaaaattttacacgaaaaataattgataaaccatttggtgaattgaaaagacaagttaatactcatttgaataatacatttgatgcagattccatgtatgtaccacctaaaactcaacttgattttagtaatggaagtgccaaaataaatgaaatttatgttgatatgattaatgttgctcaagtaacgacacatgttattatggggataattggattagctgcattactgcttattggatatgaactttatagagagttaaaggattggagaagaataatggaagctgcaaatcatttaaattttaccaatgaatcatttattaaatcttcaagtaagaaaaaatataatgttgaagttatcaaaattatgcaagatagaacatctaatttcctgagttcaattatcacagaaaagatatttcgtttaagaaatcctatattaataaacaatatacgatggtttttcaattattctgcatcaccattcttactttcattcctattactaggcttattaggaattgcaactgttatttgtcaattcataattctgtcttttatttccaatcttgatttttcacagaaaggaaatgagctttttcataacacacaaactcaaatatatggatcgttcaacgattctttgaatcaatggacaaatgagaccaataattatataggtgattatcaagatgatattaatgataatctatttgcatgggttgatactgcagctatgactattaataatacagtatctgaatttgatgaaaaaatgaataaagctttagatgcattattcaaaggaactccattatatgaacctattgaacaaattgttggatgtgttattgaatcaaaacttaaaaaaattgaaaatgcaatgacatggtttcagataatgccatttagaaatgcagaattaaatccgaaaactattctagctgaaaatggcatctattaagctgccaatgttaatgattcattgatgactctggtgaaaagtttaaaaagttaaagcaaagaaatatttaaatcaagtaattaaattctataaacatcaaaacaggatattgcttatatttccttatgtagtcttggaatttggtttttgtttagcatggttggattgtacatattgctagtaagagaatgagaaattaggaaaaagacaaaaagctagtaacttcgagaaatattctaatgatgttagttcaactggtgggaaaagtgatcatgatgatgatgatgatgataacttcatgttgaacgagacaatgaaatcaaatgaaaaacgttcaaaaggattcagaatccacctctaagagaaccatttgatgttgaaaagtgttcaaaactttgtttgtatcaggaaatacgatacatcaatacccagactttccaaaataatccaaaatattagaaatcatacattaaagctaaaccaactacgtacctacacctacggaatccaaaaccacgtatggatcattatttctctgaaaaactataaagtttttcaaaatcatcaatgatgtgaatacagtgctacagattccttggatcgaataaataaagaaacaagagagacgatgcgtaaagaaaaatcaaggattcaggttcatatggaaagatgaaagtacattgacaaataacaataattctgatatagtacagtaaatcgattagcttaaatgagggaacactttcgataattggttgaaaactatggcatcagttactcaagccagacaatggaatccataatataataatttagcttttaaaatatacccaaatataggtgaaaaatgatctatctaaccttaattatataaaaaaattggtacaaatataatatatagcatgcgaaaatgtaggatgattcaaagtaaaatcattcttcagaagatttagtttcttatccttttacttctcttttctttcttttcttttttaccttcagaagtctcagtattttcactatcatcaccttcaacatcatcatctttctcttttactttttgtcaaaggtgggttttctctaacatcttcttcaggagccacgtaatcttattgctctttcttcgtgccttactgtccttcatatcatcttgcttctttttcttttcttgtaaattctttgaccttcttttcctttttacttaagaaatattcaccagattcaatttgaagatcaaccttacgaggtaaatgtttgtggaggaaatggagtgtaaaccttagccttttctttagattgtttaggttttcttacgcgcaacactcttcttcttaaattgtggtaggaatcttgaccaattttcttctgctaaatcaggattttttagctaattcttttttgatcattattctttaatatgataaattggatgaatgttttgcatacaatcttcaattactcgtccttaaagtttttcaaaaccttgatgaggtcccataactgcaactgtataccttgaactaacatataacaatcagttaataattctaaagcttttaaagtattaccacttgggaccaattaatctttgtcttctcttaatgaatctttcccttatttgaacaataaccatcaatctttatcacttcacatgcaatatcattcttgtaaaattttaacagcttgagggaatggaactgatcttgctaataattttatcaaatctcttgcatttaaatttgaactggatcaaaagtttttttggtagtttttaacagtcattgaaccttcaaccaaatctagagtacaatcaatatgatgtctttgaagagcttttgtaacatctgcccatacagatttaagatattcttctctatattttgggaaaagttgtcatgaatgacgattcttcaaggaatgcagatccacttgcattatcttctggtttgaattcatcaatcttccatttatcaatatctggagtatcccaaggtttttcttttttatgggttgaaaccattgcttttgtataaattttcgttgtctcaaaaatctttagagaagaaacagtatagtaaatttctaagaccttaatctaagttaatgatgtgaaaaatttttttattcgtggtaaccccgtttagggaaatttctcatcttcaaaaagtttttttcaaaaaaaattcatgttacttaatgtacagtaatagtagtttaacataggtttacttctttagagtaacatacagagatgtttcgtggtaagaataataataataagaacacaaagaataagaatgataagataaagaaaccaacaagccattgacaaagaccaaacaaaagtcaatgagtaaaaagtgtttaagcaatgattgaaaaaatggatatataatactacagaagatgacataatgaacataatgatgtcaatggaaacaaatacagacacaaaagccactgtttgatggcaaacgagagtgatcctgaaagtaagaaagaggttggattatcaagtttgaacacagataaactgaaggaagatttggctaatgatgtaaagactgaggaaaaaacagaagaaagtgcagtccgatattgcagaacaattaagctcattgatgactttactctttaatattcatgtaatttatataacacataccctttactaaatactataaacctatattatactgtcactagaccctgtctatagataagccataatttgtaccgcgcctgtcccgatctggcaaaaggtaaacaaagatttttttaacatcaacattgtaatgaaaaaaacatcttcacacagttattaatgatttgatatatgatttgacttgtaccaaattaactttaactttagtttactttgtgacgagttacatttatttacccttttgtttaatttatatttggtaaggcagtgctctagattttgctataagaaaagcggaaaggttaagtttgaaaaatatttatattttacttgtctcctataatgcattctttagcactgggttatccttctcaagaagggaatcaaaaaaagtattagatgtcaataaaatttacagaaaaaattattatcacttaacagagaaatatcagccaaaaatgatcactgtataatattgaaacccaattagagaattagatatttttgaacaacatatgacttccctgaatctaagatgtgaatttttacaaaagcaagttaataatcttgaaagaaagcataaagttaaaaatgatacttatttatttaaacctgatgattttaattctaaaattgaatggagaactaactgagactacattagataacctgtgtacggaattcgattatcttaaagaacaattaacagttggtcaatggtcacttaccaaaagatagttcatttaatgataaatcaattatttcacaacactcagatatgagatcaacttccatattctcccaactcagatttacaaccatcaatggatgaaggttattcatcttctgagatatcttttcaacaatcaaagacacaaaacgaaatcctaacgatgttcagaaagaaaagaagttattgaaaatggaaagtttcttaaattttaatcacaatataacacctatggcaatcaaaaaaagaagtagaaaatttatccactgaaaggatttaaaataaatactatgagtgaaaacccattgtatgataacacagagaagaaaacgcaaaataccaaaactattaggggtaaagctttcctcaaaatcaatgaaaaaacaattggaattaattgatcttccaccaattgatgaaggagttgatgagacatttgaactttttgatgatttgcgtggtaatgtttcaatcagaaatgatagaatctgatcaagatacctaccaagacatcacgatatcttttgatgaaagacaacttagacatcatatatcattacctaatagatcgccaggtggaatttcaagtgatgaatctctacgtcatttgtgtctgatggggctgctttgaataaaagattcttgaatgataaactcaaacatactgaaattactgactcactcttttcgtttgaacaaactaatacatcaacataaaatcaagatacaaaagaaagaagagatattctgttaacaaaaacatcaattaaatggcagttatagtgatatagaccctgatgaatataataattataacgaaggattatctgattctgattcgactgatagttatggtagtgaaaatgtaacaccattggtttttaagaaaccatccacgtatgacattaaaacgaagtaaatcacatgaaagtatattctctgtggatccaaaatcagcaaaacaatatccactaagggagaaaaatcttgatcttaaggctcaaactatgaaatggttgaaacctaataacccaattgtaatcatcatctgctcaaccatataccgcttgctttaatacattcaaggatagcactaatgtgcatgaggatatgttaaacattttgaattccaatgtcaataatttaaatatttcatcacctacctgttctgataagactcaaattcacgaggatgttttctaaaactccattatcattcttggataccttctaaaatatttttaactcctatttcagttccaaaacttgaataatcaagcttcatcaataaatgatgattataccaatgatgaaccaatttcatcttggattaaaagtttcatgtccgaattccactttcatgagtgggtgatgtttgacacaataaataacaatgactctgaaacattaccatcagagagttttttgaatagagaaagacaaaatggagctggcccacaaaaaaccactaaaccaataaagttgaatagaatattttaaatgaacgtccaacctttaactcatcctcctcatctttaaacaattgatagaaatggaagacgtatggtaagacatggatatggctctagttcaatcaaaactcagtggttagttcaagggtcagttatagtgcactaagagatgcgctggccaatgaaccataaaaccatcttacttggtttgtttcacatgcataacaaccaatcaattttgtaataatatatataatctacttctttgctataatacctaaaatttataaaaatataaatgtacacaaattttctataaagaccatcaatcagtgatgttttgataattttttgatacccagctttctacctttagcaagcattctatcaagtctatcaatacctgaaccttttattggtttcttcattaaaattattattctcagattcattgatgttagtctggaaacagcaactttagaattggcaattgatttagatgatgttgtaacttggacatctctgatgattttacctgtattagcactaattttaacctttttctctgtaatcttttaaatgatgcagtaattgaattggatttatttgacaaaagtccaactgaaaattcatcatgtacatcttcagaatactagtcgttgatctattcaaatgatttcttctttgcagtttgacagaagttttcttctttaaacattcttaattgtttagaaccatcatgatcatcatcatcttcctcatcagttgataaaacttcatctcttgctctctcatattcttgatctttgaatgaactgaatctaatatcatcatcatcattaaatgatttaactttattgagcttgcgtcttttcaatgaagcactagaagatggaatttcattatttgtattattgtaataatcttgaaaatctcttttagtgattgtatcattatcgtttacatctttagcttcatgatcagaattatcttcatcaagttcagtaacaataatgatctttataaattgaaatatgtgaaggtaaattgactgccattgtatcaaaaaatggtttctttgatcattttctgaaatattatatttattatttgccatgaaactctttcctttctttaattttacgtcttctgattaattcacgccaacgtaataattcttcattctcttcaccatcttcatcatcggataaatccactgcataaacaccatcttttgcccattcttttagttaaattatgagttttaatatctttgaaagttctagaaactttttcttgatcttcctttaattcattctcaagctgataacgtcttatttcatgttcatcagtttgaatattacttgcatcatcaattaatttttcatcttcactattttcttcatctgataaatctctatctgcaccaccaacaccgtgatattcatcatcagattcaacagcttcattttccataatatctccaagtcctttagatttaaattcacgttcacgttgtttagctaattctctttctttctttttagctaacttaattaactctgcaactttttgtctatcttcttcagtttcttcaacttcagaatcattatcatcagagtcattgtcagtcggacttttcttggaattttaatcttttcatcatcatcatcatcatcttcttctttttcatcacctgctttttcttccccttttttagtatccataatattatccactgtatcggttttttcaatttctatcgttctgttctctcaaggttttgagtacttgaatcaaatagattattatcattttgggtatttaagattgtgagacagattgagttaattctaaaggttgatcaatttggagtttcaagaataagattttgtgaatcaagaagttctttgaaatttattttatttgattcattatcattactagtattttttggatttgattttcattagcatcagcattatttagttgttttgttaaaaatgaagtatcattcgatattcttgattcattatctattgatattgaattcgatgaattttgcatcctgaagttcagtcatactaatattttttaacctcttaaatttttcttgagtggttaaatgtgattgagatttttgagttggatcttgatctgcaagttcaccaaatgaaaaataaaatctttcaatgcatcattttgagttaacttaaaagatgtatcatcttgaatatttgtgtgatataactggttcagattctttcttattatcttctgtggcaagttcttctttatcttcattttttccttctggatcttcatttttcaaccttgtacttcatcatcagacatatcaattcacttgaatattcactgaattctggtcatcttcagattcatcatgagtggatgggaatttaccttttcttataattcttttgttttctcaagtttactttgttgttttaaaacgcttagaattttaatctgttcttcatacaacattttagctaacatttcatcagttaaatcaccattcgctattatttgatttaagattatattgatcatcatttaatgatgtcatatatttcattttaattgtttagcatttagtttcttaattttatcagctaatgttttctttttgaactttctctattttattcttttgttttcttgatattattaattttatatctaaagttttagtctttttaatcattgttacgtcccatatcatcatcttcatcatctgaagaatcatcgagattgatgtgtgttttagtacgttcatcatctatcttttcattttttaattcaactaattttgactcagaattatgcgttgatgagttttccaacttttaaaaacacttttgatagttattttctttttatgatttcaacaagtggagaaggttgaaggtgaataatttcctgtgaatctaaatttgaaaattgtgtgttatcaagaatcagtattttctctttgacaatttcaatttttgtgttattattgatttcattatcagagtcatcattatcagagtttgaagcatccgcctttaacgaacttaataacttttgttttgagtaagtggttggattaattttttcaattttagcagcagcctttttaagtaattcattttgaaggaattgtctagctaattcttcacgtttaattcttttctcttcaattatctctttacgatttaaggtcatttttgatttattcagcagataatcatcatcagtgttatgttcatttgctgctgaaacttttcttgataagaagtcatgttcttttgttattttatgaaatgcattaacttgatcttcaatattatcaccatcttcatcaccatcttcatcttgaacaaataatgaagtcatatttgatgttgaaattgcgtttttttcattattagctgtatcttcatcaacaatacggtttcttctttgtgttggtttgataatatcaccctcatcatcatcatcgtcgtcgtcatcataattattgtcttctttttctcggttggtatcttcatcagtgattttaagagtacgaggtttaactttaattatttcatcatcatcatcatcgtcatcttcatcattttgattagtttgtataacatttgtggatatttcatcattttctagattatcattttcaagattatcattgccgttagtttgtataatatttgttgaaatttcatcaaattttccaataggtgtagactttataggttgagtttggaaattattttcatcattaaaatcttgagtgactacaatttgagttgattgatcttgtatttgaatttgagttgaagtttctttagttaatattatattatcttgattatcttgatctttctttttctcttctctttgtaataatttaagtttcatcttttgaactacacttgtcaaatcacgagatttattattattactatgattaatcgtacttgtatctatatcatcatcattttgaataccaaattgttgagataatattttagaatgatgtgctaaataatcatcattttcattatcatcatcattatcatcatcattatcatcatcattatcatcatcattatcatcattattttcaatatcattattattatctatattattatcaattcactattatcttcatcggtattatttgatttttctaaattattatttactaataagtagttagcattcttttctgaattttcttccagttgttcaaacacttccatttgatgatagtaagctgtttgtaatggcggttagtgtatataattgctctattgaaagctttgtgaaataataactgaaatttttgtaggatcttgatgtatatataataatctaaaataattttacttattcctttacgcgtcatgttttgattatttcacaatcgtcgtatcgacttactcatatacgtgacattactaaaacgcgtttccaatcggtattatgtttacttatgaatttaaacctgatggttgattgattttacaagatgaaagaagaaatttttacatttgtgatgtataatgagatattcagaacatcaatattagaggaaaaaaattctctatgcagacaaatgttatagaaaaaaaaatgaaaagtattacatgtttttgttttaattattcaagattagttactaatgactatctattgcagaagaagaagagaataaattttaacacttatgaatgctacgttgataagatctcaaattaactcttaacttaaaaaacataataattaaagaattttccagaagtgctattaataaatttattttatcaaactgctaattttaatttcagatatgaaaaatttcatttttaaagagtattagcaagctcaacatttggaagagtcctgatgaaattaaatatagtaatagtgattattcttgtgtagtaagtcaattaccgaaaaatgagcatgtgctagtattaaaatattacgtaaattaaaataaattgggctccccatgtgtagaagtaacgtttgatcaatgccatctcccacgttcaggtactaaattataacaatattatgataatattaatccttaccagtaagttaaataaagttaaataaatatctactaatatcattacattatttgtcaactaagttgtctgtacagttagtcaatcaactatccactctcctgtcaatattttgtaatatagtaatggatgatgtaatggaagtaatttatagtataatactaataaatccttatctctctttttcaaatttaaaaaattcaaacaacacagccgcgaaattaaataaatgaaagataacaattttcacatggtaacagtataaccgggcttttcacttttcacatgccaataatattaactgtacgctctctcccacgtgcaaattgtatatttaacagagggttattcccgtattgatgtaagggttattgtataccccatcatcaacagtttttgaaattgtacttacatcttttgactgttaatatgtcaaattgtacattaaatacagttattatttttagtactttctctacgatgagatgagcgtttgatttctatactatacagttacgttatcacttatctcaatgataaaaatttagcatgcacatcgcccccctcttttttttccccctttcctacatcttttgctatcttgctatcttatctcttatctctgtacaagtaatggaaaattagaagcggttacttgttttttccgagtattcgttaaactttaatatagtagtagtaatgaataaaggttaataatagtaataaggttagtaatacatagtaattaataaatactatacatcaattaagtaacccagtactatattcaattaattattagaattctttagttagggcacgttgatatggataaataactcaaaggtatcatattagagtgttaccggagaaagatatacttacttaggaaggataattaataatttaatatgcacatgtaatttaataacttaataacttaatagcttaataaaactttaaaactcaatgtcagaacttaataattaatttgccgcgttattgtatatctgcttctttttttttttctttttcttttcttttcttttcagttcgccgtcttcttaaattcactttctggtctatttaaacttgtctatttctcaggtatttcactattcatgcatgttttatttattttgatatttatattaaattttgatattttattttcttttctttttctatctctccaagcaacaaaaatgcctttcaaagaattaccatctattattaaaaaggaaattacttggggtagaaatactattaccccagaagatttacaagtcttagaagttactgataaaaatggtaacattgttacaattgaagaagaagatattgctccaagtggtaaaaaagattactggcctatctttacagctggtgcaggtttattctctgatggttatgttaataactctatcggtactgcttcaacttgtctttccatgatttatggtgatcaatatactgaatctcgtgctttacaaaatgtttctgcaattgcctttgttggtactgttattggtcaattaagttttggtgttttctctgattatatctcaagaaaattggtatgcttgtcatcatctggtggtcttaatcttttctctattttagctgcaggttcttggggtaaaggtactcaagctcatgttggtggtaatgcaggtggtttatttgcggctttaactgctctatagattcttttaggttatttcattggtgcagaatatccaactggttcagctgcttgtgctgaagcttcatctttattacctgcaggtaaaagaaatagatattttacttggtttactaattttatgattgatttggttttgttatctcagcttttgttccaatggtttattatggatttgtggtaagatcatttacaaccggtttggagaattactttaggtattggtgcaattcctccaatttctttattcataatgagattattctttaaagaaggtacacaattccaaaattaaatttttaaacgttactagaattcctatcttattaattattaaatattattggttttagattattaattgtttcaattatttggtgggtttatgatttctccgcttatgcatttggtattttattcatcacccaattttaaagagagttattccagatggtgatttatataaaacttttggttggaatgttgttttaaatcttttctatttaccaggttcattccttggtgctattgcaactgattattttggtccaagagtaactttagtggttggtattttcttacaagcaattattggttatattatggcaggtctttatccacaacttgaacaacatattggtgcattcgttgtagtttatggtatttttatgacattaggtgaatttggtccaggtgataatattggtttattagctgctaaaacttctgcaactccagttagaggtgtttattatggtattgcagctgcagttggtaaaattggtgcattcgttggtacttatgcattcccatcatttcaaaaacattatcctggtgttaaaggtttacaagttccattttggcttgcatcatcattagcaatttttgcaggtattttagcattatttggtttaccagcagttgatcaagaagcaatgcaagagaagattttgaattttttagcttatttaaatgaaaatggttttggatatttcacaattaggtgatggttcatattaactggtaatgttaatttagaaacttttagaatacaaattcataatactaactcatcagtgatgaacaagttattgaagttgtaatggtaaagagtctggatagtatattgatgataactgttagtctattatttcaaaaattttaattctaatatcgtgtgctttttttttgttactatacatagtttttataactttccactttctgtaaatttaacttattgatacgaatttactttgttttcatcattaaaccagtacttaaagttactccttcctaaatttttttaaaatattcttatcacgtgtaaaagttcaaaaggcttagtcgcgactgttgacaaatcacacaaccctttcaatttttaaacagtctattaggcagttatttgggttataaatttagtctacctataccctatcacatgttattaagtctctcttaggattttctgatttaatacatagtttattttaaatcaattgaaatcaattgaaacttaaacaatggaacagaattcacctaatttgatatataatcatggtaacatgactaaaatctaataaatccatttaattcaattaatttagaacaaccaataattcctaataaaccatcagtatcacaaccacaatttaattttactacaagtttcatcactaaaatcaaataagagtttccaaacaatcaccaatattaaacccaattcaattaaataataaaatattgtaatgcagatatgcaaagatacattcaactaatactccaaatttctatttaataatagtaacattaattttaatcataataatattaactcataatccaacattgaaaatatttcctccaataccaccactaaaagaattagtcatcacagatgaatggtatttaaatcataatacatcaaattcttcaaattcatcacatattcaacaacaaaattcaataccaaatatttgttcacctaatggtcattataataattcacaagttcacaagttccgcaagtaccacaaattccacaaattccacctgtcaagtacctcaaacccacaacaacaagttctcaacaagcacctcaacaacttccacaaacaagtacccccacaagtaccccaacaggttccacaacaagtaccaaacaggtttccacaaacaagtaccccaacagtgttccaacaacaagtttccacaacaaggtctgccatgttagacctgcaatgttggagaaactgttaccaggtacacaatttaatttgttgttaaccatcaagttaccaattatgaaatttttaggtgaaggaggatttgcaccatatttcatattgttaaattaatccaagtgaacaaaatagtgaaattgcatgtttaaaaagggttattgtaccaaataaggaaggattaaatcaattaagagcagaagttgaagttatgcaaagattaagtaaatctgataatattgttaaatattatgattcaaatgcaagtagattaaatggatcatcaggtaaatatgaagtattagttttaatggaattatgttcaaataaatcattattagattatatgaatttaaaattacgtacaaaattaaattatgaagaaattttgaaaattatgtttgatataagtaaagcaatttttaatatgcataaaattaaattaattcatagggatattaaaattgagaatgttttaattaatgaaaattttgaatttaaattagcagattttggttcaacatgtccaattttaagggtaccaaaaaatcatcaagaatttcaaattttacataatgatattttaatgcaaacaactcctcaatatagatcacctgaaatgattgatttatatagaggtttaccaattgatgaaaaatcagatatttgggcatttggtgtatttctttataaattatgttattatacaacaccatttgaaataccaggagaattaggtattttacattcagcatattcattcccaattaaaccaattattaataataatttaaaaaaattaattaatataatgttacaagagaatccaatttttagaccaaatatttatcaagttttaattgaaatttgtaaattaaaaaatttaaataatgaagaaattaataaattaattataaatgatggttataatgatttttatggattaggtgaatataaatatccaaataatgaacaaatttatcctgcaattgaaccatttaatccaagtatcataccaatgttttcaccatttaaaggattaccaaaggatccaatggaaatgatgaataatagtattagtatgaataatacaatgaatatgaattctacacgtacaaattctaattctaatcctaatcctaatcttaatactaattatgcatatggaattctactaatcatgatagtagtagtagtagtcatattaatactaattcaaataccggatctaaagtcattcaagtttaacaattgataaaactagtgaaattaagggaaatgaaataagtgaacttgaaataggaagatccatttttcaattcataatgaagtaataatgaattacctaaaattttaattgaaccaaaggaagaaattgaggaaaattattcaagagcgtagtgaaattaataataatgatattaaagatgaagattggaaatattaataataaatttcctagaagttagtttattaatgatattccaaaacgttagtaaaagtttaaaaattgaaagaatggtaaacgatatagttctaattaatccattcccaattgagaacgctagtgaagaatataagaaattacaagatatgttaactggtataatagtataattacatttaatgaaattgaaggtgatctaattagaattgatagtaatattaataataatgatgataataataatgataatgatgataatggtgaagtaggtaacaatggtgataatggtggtgataatgatgatgatgataaacctaaaacagttgaattaaattgatatattttttttttttcgtaataaataactaaatataaattcatataaataaataatataaatataaatgtaaagttataccatactatattatactctctaattgaatattattataataacataaattaatgagcatgatgacctggttctcatcaactgggaaaacgaaccaatcatcaggtttatattcttctgcaacaacattaccatcagcagatgaagtagtaacatcaacaggagcagattcataagcagctaaagcatcagcaccttcaccttcaattgcagggaattttagcagcacttggtaatttccatgcctttgttgcagattcgcatcagcatttgttaaaggagttggtttaaaagcttttaattcctttaacataaagatctgcaataatgtttgaacgggttaaagttgttgagaattgtcttaaagattgtctgaacatttttagcttgttttaaatcaatattcaaaagatgttagtgtacctgtactatacactaaacaaatggaagtattatggagagtaggcgaaaaaaagggcgagaaaaggaggtgagatttaattggttgaaaaaagttttagtttttttttatatagtgagaaagagagaaagtatttgattacataataagaacttataaatcagcatcatcttcatcaggtagaggcattgcagcagcttgatccatttcagcttggtatttagccattaagtctgaatcgacagtaacttcaggtggtgcaagagcaggagattcaacaaattctaattgattattaccaactaattttctagctaaccataagaaaggtttttcgaaattataatttgattttgcagaaatatcaaaatattgtaaatttttctttctatggaaagtaattgtctttgccttaacttttctttccttaacatcgactttattaccacaaagtacaattggaatattttcacaaactctaactaaatctctataccaatttggaacatttttataagtaattctagaagtaacatcaaacataataataccacattgaccattaatataataaccatctcttaaaccaccgaatttttcttgacctgcagtatcccaaacatcgaatttaatttcaccaaaattagtgaagaatgacattggatgaacttcaacacctgaagttgccatatatttttttcaaattcaccagttaaatgtcttttaacgaaagtagttttaccagtaccaccatcacctactaaaactaatttaaaagttggaacttgttgtgccattgtttgaatattaatttgtttaaagaaagtaggaaagtaaacaaaaaaaagaagctattaaaaggagagaagggagtgtataaagtgatgaaagcaaatatgctaaaataacactatgagaggaagaaaaaactttttcgccactcaatggaaaattatcttattactatgacggatcattattattattattattagtattattatgctcggaaatttaccctctgctcggaaatttggtgttatttagtattactattatacagtcggtggtgggtatggtagtgagttatctgttggtgggtatggtagtattagtgtgtgtgtagggttattactactacctggtatccccttgaatagtaaactgtttaatggattagtactattagtactattagtattgataatagtatctttcttctctattataacattcctgtaatattcttcaactaattgacaatgtgttctaccctttaaatgacttttcctcactgatggagaatcatgtgttagatgtgtttgacagtaatgacaataatatttacccatatgtttagtatagtgaagatgaagtataaagattagataatacgtgttttaattttaatttttcagtatcatggatttataatttgattttctcaatggaacaattcctataatcatcatttcttttcttattacaacaatgactatattaccaataacatacaatactacatctaaaagtatatcaactgataatactcaattagaaactgaaattacacaattaaattccctttattcatcatttatttcattaaattctgatataccaccacctccatcacctacaagttttacaaaagaattatcacttgaaattaaaaaattacatgaaacaggtcaaggattattacgtcaaaatagatttaatgaagctttcactgcatttacaagaggtttagaattagcaaaatcaagatcatcatttgaaccatttcaaggttcattacctgaattcttagtttgtttaatgggtagatgtgatgcatcaatggcaatgaaaaattatcaaatggcattacaagattcagaagtgttaatattactaggtgcaacaatacctgataatcatctcagacatggtacagctcaattacattgtggtttaatcagagaggccgtcgcgtcgttccagagaggtatctcaattaagggtgatcaccctctattaagaggagcatttgcgcgagcaacagttcttttgcaattagagaatggcgatttataattgtgtagtgttttatatataagaatttgcatttcttttttaaaaggtaatggcaaatatacgacgtttaaatatggatactgctaatctttatcctagtaataataatagtattagtagtaataataatactagtatcaataaattaactcctttaccagggtatatatcattaacatctgatgaagaagatgatgacgatgattttgatatggctaaagatttaaaattagatagtacgttgttcaataagaagaaaatatccgaacctacaagtataaatacaagtataaataataatatgagtaatgtgaataatgtgaataataataacgtgaataataataatataactataccaactgagcctccaataccaataaaaaatattaataaacgccctaatttagcttttaaatatggttcagatgatgataatgataatgattcagatgatgatgatgatataattataacaggtattgcaccttctaaacctccttcaatatcaactgataattcattcactaatttattttcaaattctctacctccaacttttaatacgcaaaataataattttaaacgcgaaatgaatgatgacatatcatcatctacgcgtattgatgatttaaagagacaacaaatacttgcaaataaacaatcattagttgaacaaaatattaaaagagagaatgaatttcagcaatcactattaaaacgtgaatcagatgaaattaatcatcaaaatcaattaagaattaataatttattaaaaaattatcctccaattaaacaattacctgaaaaatatcaaataccatttccttcaattataaataataatttaaaatctgaacctttccccatattaccaaatactatatcatggaatgaaattcaattagatatttcatcaaatttacctccacctttatgtgttatgaattttagagatgatgtattatttacaattcattcacttaattttagaattatgaaatttaatgatttatattcaagaattgatatatttttgaaaaatgtaactaatttaaaaaatcaaataactgctaaagctaaacaatataatggtaataaaaaggcagatttacgttataatcaaattttacgttttattaattcaagattaacacaactttcaagatttttcggtgaagttggtcttttaattgatcgtttgaaaagttataaattgaaaacaatcgaaaattccaaaaaattagaaaatttaagaattcaatgtattaatagtattagaaatggttcaagtttagcttcattaacaataccttcaaataaaatctttatgaaattattaccagaagttactctaatgaataatacaattagaacgatgtatcaatttcaaaattataattcagatccaactaaaactttacgtgaattctcactttctccacctgctttacctaaaatacccttaccaaataatcctatggaaaataatcttaacaacaataataatatcccaatgaaaaataataataattatcaaataccttcaaatcctttctcatctaatcaaatatttgaaattttagataataatatgagagatgatactgatgatttattaccattttcaaatatttatagtaatggtggtaataatgcacaaaatgatgaagaaggtatcaaaaatttaatggaatctattaaggcaagtgaaattgaggaagaaggtttagccaatactccaaaagatttagcaattactttattaaaacatcaaagaattggattatcttggatgttgaaaattgaaaattctccaaataaaggtggtatattagctgatgatatgggattaggtaaaacagttcaagcaatttcattaattgtttcaaataaatcaaaggatgatactttgaaaacaacattaattgttggtccagtttcattattacaacaatggcaacaagaaattaatatgaaattacaaagtgattataaactaacaactttcctttatcattcaagtaataaagttaaatcttttaatgaattatcacaatttgatattgttttaattagttatcaaactttaggatctgaatggaaaaaacattatggtacagaattagatattcaacaaaattctttaaagaaaaaaatcaaaggtatgaaaaattcaccattttatacaaataatgcaattttccatagaattatattagatgaagctcaatttattaaaaatagagcaacaattgcatctaaagcagtttcatttttaacttcaacttatagatggtgtttatcaggtactccaattcaaaataaaattgaagaattatatccattaattagatttttagatattaaaccttataatgattggaataaatttaatactagtattgtttcatcatttaataataaatatggtggaggtggtagtacaaagaaaattcatgcattattaagtgcaattttattaagacgtacaaaggatgatgaaattgatggtaaaccaattttatcattacctgaaaaacatgttactgaagttaaagttcaaatgggtacaattgagaaagaattttatgatcaattagagaataaatctgctaaaactgcaaataatttattaaattcaagaaatacaaattattcatcaattttaacaatgttacttagaatgagacaatcatgtgatcatcaatatttagttagattaggtgatgatggtgatagagttttaaaactggatagatttaaaaatggttttgaatcaattaaagaatatagtgataatgtttacaaaggtttaattgcaaaagttgaaaatgaagaaagttttaattgtatggtatgtaatcaagatttaacaactaaccaaactctattaatgagtaaatgtggtcatacaatttgttatgattgtcatgatgaattttttgaagataattgtgaaagtaaagtaagtgatgatttatcagcaaaatgtaatatttgtggaatttataattcatctacaaaatcagttgatttacaattatttaattcatttgttgaaggtttaacatggcaagaaattaggaaaaaatttgatttagattctaaggcaagtgataaaaattggagaatgaaaactttacaaaaatttattgcagaagatggtggtaatttattaattactgcaaagatgaataaaacaattgatattattaaagaattattcaaaaagtcaagtactgaaaaaattattgttttctctcaatttattggatattttgatttattgaaaatcttattaagtgaaaataattttgaatttttacaatatgatggatcaatggatattaatgctaaaaatgattgtattaattcattttataaagatccgatgaaaagaattttacttttatcattaaaggcaggtaatgttggattaacattaacatgtgcaaatcatgttattatttctgaaccattttggaatccattcgttgaaaagcaagctcaagatagagttcatagaatttctcaaacgaaggaagttttcgttcatagattattaattgaaggtacagttgaggatagaattatggaattacagagggaaaaagaggaaatggttggttctgcactcgatccaaatgcacgtagaaatgcaggtaagttaagtagaaaagaattaggtttcttattcggtttaaatggtttagctaatttagaaaatgaatagtagtatattagatattattatagtagatataatgtttgtataatagtttaattattgaaagaagtatgatcgatcaagtgttaagtattgttgtttattaacatgttttgaaatgggaaataatattttacgtaataatgtatgccattcaatgaatagcttcatctttatagatctatcggcacgctggtgtagtataagacaatgagtttattatataaacaaactactaaacatgtcaatcaagtgagtaaggatatatctactttaagtagtaatttgaatgatgaaggtaatatatcgaatggtatgacattatcattaattggtacaatttccacaacattaacctcaattaatagattattgaatgattttgacaaatatataaacaatcaaactgaacctaatgctaaagagaagaatagattaagatatgaaagacttttcaatgaatatgagcaattaagaactgaatttcaacaattaaagaagaaaagagaggataaaataaatgaatttaaacaaatgaatttaaataatgaaaggaatggattatttgaacaatcaacagcaagtggaattgatgataacccatataatggattaaataatagaaacaaaggattcaatgatattttatataataataatgatgattcaattaattcaatgatggatcaagagaataaattacagagaggtaatgctagacttgatgaaattttagagatgggtagagcagcatttgatgatattgttgaacaaaatgagactttatttaaagtacgtgataaaatgagtcaaggattagaaacattaggtgtaagtcatcaaactgttggtaaaattgagaaagttttatgggaggataagattatattctatgttttcggttcattaacattattcattatgtatttaatatggaaatatttaggttaaataattagacaaataagttatatgtatatttattaagaatttataaaagaattaaacacttttggtaatgtaattgaacaatcaccaataaaattccaaacttttgtatttgaagtttctttaattttatcaatctctgaatcttccactatattaaaaacagcaatataaccaccattatttttaataacatcaatatatgatgatgttggccaaaccgtatgcgaagtaccaataactaataacaaatcaatatcattttcaattataaattcatctgcttgatcaattagatataatggtaatgattcaccaaaccaaataactcctggcctaagtaaatatttttcaccatttgataaacattcaggacataatggtaattgatctaatgaattgattgtaggtaattgggtattttctgaatcttcatatttagtagcatccaatgaatcagttaagggatcttttaatgtatatttactataataacacataaaatttgtacatttaacattaaataatgaaccatgaaattctaataatttctctctattatgaccacttctatgatgtaaaccatccatattttgagatattgttagtaaattaaatttatcattcaaattacttaattgagccaataccttatgaccttcattaggttctgcctttaatgcttgatgtcgcttgagagcataatataaccaaacaagggcaggatttgaatcaaatgcatctaatgttgctaaatcaataaatgaataattcctccaaacgttatcaccatcagtatcacctatatttgagggtataacaccagagggagcagatagccctgcacccaccaaagccagcacatttatccttcgtccatccaatgtcttgtcatataagaacttctgaaactcctgtatactgtccatactgtccatactgatgtattttgtcttaccttaagagatagatagagagatgtccaaacttacgtaatgaaaatctataggaggacctctttgaaaatcaaaaaaaaattaacgccgtcaacaacgagcttgttgtttataattgtagttttttttatctttttcgtatattttaaattagataacagcagcaatgtcacttagtgagagggataagaattatatgaacgatgtattctttggtatactcgatgatatctacaaattggtcgatgaaaatggtaatgaattctcatacgccttccatgcattaccattacgtgcaaatttagaatattataaagtaattaaagttccaatgtcatattctaagattaaaatggcatcaaagcatcataaatatacttcaagtcaagcttttatcaatgatttagctcaaatcacttggaatgcaagattctttaatgaagaaacttctgatttttataaatttgcaacaattttagataattatattaaggatacagttataccaaaaataaagaatgatcataaaattgttaatacttatagtttaacttatcctaatttgggtcctttaccaaatgaaatgtcaactattaatccaaatgatataacaaccattaatccaaataatatatcaatgggtaataatactaataataatatcaatactcaatctattcctattaatacaaacactaatatgaacactaatgttaacaatgcaactacagccactaactcacaacaacatattgatgatgatgataattatgaaaatgaaaatgatcaagaaacttatgataatgaagataaatttacaattaaccaaaattataatccttcaacttatgtctctaaaattgaggatacgggtaaagatcatgttttctatccacctccaaatgtacttaatttcacaccaaatagacaagtattagatcaatgggttaaacgtggtcgtcctccaattgttgataaacctcatgaaatgagaattaaatcaattatgagaggtttaaagaaaattaaagttggtggtaaaacaatggtttcattttgggataaattacctggtcaacaagaacatcctgattacttaaaaattgttaaagatccaatttcaatgttagatattaaaggtttaattaaacaaagatattataaaactgttgacgcatatgttgcagatgttttcaaattaattaataacaatagattatattttgttaataatgaatttattaaaaataatttaaatgttttagaaacaaatatttcaagattatatcaaattgaaatgtcaaaacctgatgttgaatatatttcaggtcaacaaacaaataaattcccattaagtcaagttcaatttaatggtagaacttataaagttggtaattggattttaattaataatccaaatgatcctcaaagaccaacagttgcacaaatttttagattatggcaacaagaaaatggtgaattatgtatgaatgtttgttggtattatagacctgaatggaccgttcatagagttgatagattatttttagagaatgaagttgttaaaactggtcaatatagagatcatttagttaacgaaattttaggtccatgttatgttgcatattttacaagatggttaaagggagatcctggtataccatttgatggaccattattcatttgtgaatttagatacaatgataaagaaaatacatttgctaaaatcagaacttggaaagcttgtttacctgatgaagttagacatttagaggatccaattaaaacattaagtagtaatagagttttgagaaaattcccatcaccaattaaaggattattgagacctggatcaacaagtagtacaccaattccaagtccaataattattaatatgaactcaccaccagttgttggtgcagtttatgtgccaagagttgatgatgaaattgatgaacattattttgataattcattaaatcaaaatgaatgtaaaagttatgtaccaccaactaataacattagaataccatcaagtgcattaattgagaattataatttaaataatcaaagtgattcatattcacataatacaaatacaccagaatatgaacaagttcaaaaattatcattattaaatgatagtaatgataacaaattcaaatcatataatgttaataattcaattatcaataataactctattattaatacacataatattgttaatcaaactcatcattataataataataataacatatcatcaattaataatttatcaacacataaaataatcaaatcaccatataataatacaagttttacatattctaaatttcaatcaccaagtacatcatttacatatgttagagaatacaatgatttatttaatatacgagaaacttctattcatccattaattcgtagaagttataaaaatattgatagaagtaatattagtaggatttatggatcaatcaagaaaaagcaaaatgatattggaatttatgatccaaaggaattacgtgaaaaatttcgtaaaattgataagaatggaattttatggtttagaggaccaccattaaatattcaaaatagagttttaaatgatgatagtaatgttagattaggacatagtgtagaatatttaacatggaaaattaaacaacaaaaggagataaaagaacagaaaagtaaataaattaatatatcgatatttaagggtatatatttgtatataaacagaattgtatattattattattgataaaatattattatcttaattaaaacaaaccccagtattgttcaacaccataagagcctggttgtttccaaagatcattgtaagttgtaaatagaataactttatcaccaactgcactaataatactttgaattgcctctgattgttgagatttaccaggaacacctaaactaccaaaagtttgaccttgagttggccaaccagtttcacaaataagtacatctttattacataaacttgacattgaatcaattgaatcactaataaatttacctgaattttctggagcaatattaccattccaaaaagcatgttgattaacagctgcaaaatctgatgcatcacaaagagttggattattttgatatgcaggaactgtatcaactgtcacaactttaccagtataacctaaagattgtaaaattgatctacccttagaaactgcacctacaacagtatcagcagaataagtacctgaattaacccattcattaccaacagctacagcataaattgcatcccaaccacgagatgatgatttaacttgagttgctaataattcagcatctgattgaattgaatcaagatagaataaacctgcaaaaatttgttgatttgaagatagtgaatcaagtaatgctgaaataacattacaatcaggagcgtagactctaataagtgtaaattctgataatttttccatatctgaagcaatttcacttgatgatttacattgacctgagttagaatatggtgaataagtaatacctttagcaccggagtatgaaccactactattattagattgagcagttgattgagcagtttctgaattagctgttgatgatgaagctatttctgatgttgtaactgatacagtagttgattcagtagttgattcaggagttgtagttggtgagctatcagttgaacttggggatgcttcactttgtaaatttttattaaccagttgaatactgaaatttggagtgtccgttgaagttgaagttggagttgaatctagagcagtagttgatgtagcaaatgaagatgttaacaactcaaaatgagtttgaaaatagtattttgtgtcttaaacatacccgaatttcgaggtaattgtgaaatcgtttaatcgcttatccgaaaaattcaaacttttctcaaaatgttttttttctagcgaaataagagtaagaagcaataattaattttaaattatgcagccactatttttaaaacttgtctgcttcaacaaatacacaataacttgctatgcctatcaatagcttgatagatggtgatgagatgtttataattacttatatcattacataacaatacataatagataattaattaatttaactttttagtaatattcaaataaaattcaatataaaggtttgaaatacgtttattataatatgttttatactgattgaaataattatgttctataaatatacaaacacataaataaaatcaaattcatttaccaatatccttagaataagattcaatatgaatatcataaagattcattataactttcattgttatttttttcataatataaatgaaataagttaaaaaacattgaaaataatagactattgcttattgaatttagttcatttggtaatccgttatttttatatttatttaaccataattcatatatcaaacatcaggaaaatttacacgaactttagatcacaaattttatgtaattttgaacattttatacaaactagatttgaattcaaattaattaaatttttaattacaccatcattttgaaacaaaatatcaattgaattaagaattacttgtatacctattttcatatacgttgagaaatttatcccaaaaacttgaattaatataattaatatctttttcaattgaattaacaaatacaagtattccaaaaagtttcgaatatttagaaatgatttatatttaaacatttaataacatcaatatcattgaaatatttaatcatataaatataacagattgaataataaagttttgaattatcacaatggtgttttcaattctttaacataaaccaacatttaccacattgctttttgtaatatgtatatttcattaaaacataatttgaaaaatggatcttcattcaaaagtcaataattaaatcattatatttatcatttaattttgaacaatttttaaataacaaattaaaatatcttttcattaaaataacttcttaattcaactgatttattactttaatccaaaattcaaaggcaaaacatcttgaagaattactcttcaaaccttacaattatcacatatgattaaaagttttttcaaaccagaattcccacaagttgaacaaagaacattatcaactacatattatctaatgcaaatataattgatggatcatctctaataaataaattaccataaactctacatttttctactattgacattcttcagtatttaataatttaaaaatttaaatcttaaatttaaatataattcaaaattaatttgaatcttgattcggatttcatcaatattattagttaaacacttaaaatttaaatctttatgatactatatgaataaatacttacataaattaaaattaaattgttataatgacaatgatgttgattatttcaatttattaaacatttattattgccattaaaattatttttgaatcctatagtaatttccattaaataataaattatttatttgtattagattcaaaatgttcattatatttatcaataattttaattttaaaaccttgatcaaaattaattctacgttctgattctaaaaataataataattgaaatcttaaattaaaatattcatgaatattattattcaaaaattgattaatttcatcaaaattcattgttgattgaaatgaaaaatcaattattttatcaaatattctttcatcaataaaacatgaaaaatgaatacaaataaatattaaagttatattattcgtacaacatttatgattattagcacaatctccaattgaacattttttacaaatttttttgtctctaccaaatgaaaatcgtctctcaatttcataaataacaatctcaaataatacatcttcttctttgaaataattaattgaatgattaaatctattattatattctttatcaaaattggaaaataatttatcgagcacatctttaccataaacaggtacagtagaatctctaattttaaattgttttctatgatcaattcttttccttaaatttgataaatttatcttatatttcttcaaatctaatgaattaaggttcatatttttataataatcatccaactttttaattcagctgtaatatcattaatacattcatcatagtcattataatcatcagtatcgtcattaataataattgaatcatcatttaaattatcatttaacctattagattttctttcttgaatcattgaacctgcagatgatggtacagaactaattgcagttttctttgatgtattattagaaactgtaatattattaaaagattcttcttaattctaatttatcaaaatattctttatgagttttcttacaagtaataaaatattgtcattattaatgataccagggtgagtatttaaataaattagtaaaataataactttaattgactaactatatgtagatgaaatgttttcttagaataattgtattaagcataacactgaagttttcattagaatcagcactataattaatatcaaatgataccaattcaagcggtgatgttcttagtgattgtgatgatttaagtcaatgattaactacaataaaacagcattgcctttgaaatgttgtttataaagaaaacaaggcgcttagagcggtttaagtagttttgaaaaccaatttatagagatcttcacttctttcttattcagttctttttggcacaggtattgtttagttatagatgtgggtatattaaatacactagttattaatatacacataaataacatataacatcaggcatatgatcttccattcaatcaaattgcctagtcgttgtttacagttactcatttatatacctgattaggaaatggttgctccattaggaaatcatcacagattaggaaattgatataaaaattaacataatactcaaaggaggtgttgattaattaactttctcttattgaaagattgataattatgtccactggaacaaatctcctaattaagaatctgtttttacaaaagtggtgtggaaataatgtttaaaattgaactcaaataaatttagcaaatttatagcttaaatacaggtactcccccactttaaaaaaaaatgaattccattagataaagattataaattactagtatactataatatttcaataacttctattttttcaactaaattatttaattggaagatattctattacatttaattcaccagatattatatcttcatcattctttaaactttcataaccatcaaaatattctctataaaagttcagaaagacttcagatttacataaatttcctgattttgaatcatccttatagaataaaatacatctaacaaaatgaaaaattgattcacatatttcagttctctttttaaacgtaatttcttcttcatttccaacaaaacaatatttaaaataaatgataataattctttatcacataaaacaaaaagagttaaaatttgacaacctaatgcaaatttatcaacatctgaatcataagaagcttctgaataaaattgaattaattttaaaattttatcatcaatattaattatatcatcaaaagcttcaatattgatcatacaatcaataaattttttgatatacttagtattaatatgatcgttaattggtggaaataaaatttcatgaattattctctcatcagtttgataattagaaaaaattttaataaaattaaatctttcatctttataagattgattaataaattcaatcaattcatctatatcttcagattcagatttcacaaagtgttttttataaacatacatatagatattataaggaactttcgttttattttgaatttttgaacttttaaaaacattggttaaatttgatttatttaataaattttcaagttctttaattaatttgaattaggttaaaagttcgtttgggttagacatgttattcatcatcaattgaaaagattaaaacatgtttaatgaaaatatttaattttgacattatttgaatcatttcattcaatttaacgatacaaccattatcaattaaacaactattaatacaaattgaaaacatgattcattttatttttcaatactctttcattaacattaatttcattatcaactctttggtaaaactcaatagctttataatctttaattttttttaaaatatcatcatttaaatcaaaataattttcaaattgtttcaaatttataataatataataaaaacaataacatgtataataaaaatttccaaaatcaattgaaacatcagttttaaaatagtcaagagtcttaacttttttattaaacttatttgaaatattcacattgattgaataattatactttttttgaatttttttaaagtttttatccaaataagttttcattattgaaaattctctataaaaagtttttctaatctggaaattaatcttattaaactttttattgaattcaataatattgaaaattctatttaaagcagtatcaatataaatcatattaataatttcaatcttttcatttaactttttaacttttttaagttttcatttatcaataatttcttcaacttctttatcatcgttataattatcatcattttcaacaatctctttcctcaatagtcattagttgtagaataaaacattgtttgatctcttaaatagaaaactttaataattctaccatcaccattctttgaaattttctaacaccattattgtcaagtacaaactttctttcaaatagttcaaaataaaaaggaattttatcgtaatcaataatgtcaagtatattataataatttcttattaaattcaatcaattccttaaaatctttaacgaaacaattaacaagaacattagaaggtgaaactgtctttctttcaactttatcaagctatatattgttgaaaattgaatctgttgaattaattaattgtataataattaaaccagttttagtggattcgtataaataaattttgttattattcttatctgctaatttacaacaattatacttgattaaatattgaaatttgattttgaaacatttaaataattcaccataatctgattcaattaatagtctcattccttaataatgaaagcaatatttggtagttttttaataacaaagagagttttaatttgattcaactcctaatagactgataaacctttatgaatataataagttgaagttataataaaagaattcgaaagattgatcatactattcatggtcacagctatataaaaaccatgttttttattcgattgctacgtaccaaccaaaaaaatgaagtaatggtgattctagtaaaaactagattaagatattgatatgttaatctatgacaaagaccaaataatacttgctctataaagaactatatacgacaatttacttaacgataatgcatttatttgaaaataaacaacgttgtccattatttcctgatattacgtaagtaatctcttatctcttaataactatattttaatccaatcacagtgaacaattataaatgatgttgtttacttgaagaacttataaagtgttttacctattgttattcaaaattagaccatattaattttatcaaaatcgaatttcaaattcattaacattttaatttagcatgtcattattttccattatcatcaccatgcattagttcatcaactatttcaatttcaattactttgaatttataagtagtggtaatatcttcactcttaaacttatctaattcttttttgggtaattcaggtttttatgacacccctatttatttgacaaatttatcagctatattaccatcaaatttgatttgaccagtttcaaaggtgccaatttaatgatgcttagcaaataattcaataaagtattcaccacttaacatattatcatgatttatatttgataaactagtagttccagtgcatcgtatgtgttgatcatttcatttctttatcataatcggcgtatttagtaccttactgaatggttttttttttgcaattattcaaattaacatcaaatgatattcagtactgcatattaaagagtaaaatgccaaattgaaaactttctataataactaataattaaacctgttggaataagcataaaatatattaattcattttccgtaaattactctcaactaatttgaatagcttattcttaaattttatatcatgctaaagcacggatatgttatgagggttctttgacttcttaataaaagtaggcatatctttgttttaattattattatctagcattaatagtattatttcaatcatatcattattatgtataatggagccaacattttgatactcaatctaattactattttcatttttataatagattaaagttcctgatattccatttcttggtaatttcattattggggaattcttaattagtatcggttgttgatactaattctatacattcaagtataacaataattgatacattcatcaacgtatatttattcaaaatgtaattcatattcaattcatcaatctatatttgagctgcaataccatttgaaggacatataggattttaaaagttcaaagaatctaattggtgaagataaagaaaactttcagaagaaaagttaactttgtttgttaataatcatgatgtacgtcaacttgtaaccattcaaatacccgagaacctaccatcattaatatcagtaaaatcccaaatacccgaaaaaaaggtacttttctgaaaaaattattttttcaacgaattaaagaataccattagataagctatgacatgagatttgttgcttaataatagtagtttcacattttgttagctttttgaccacttttaagtagtttaacgttgaatatagttattattagttattagaaacactcaaacatgtattataattacttatttgaagtaaaaaccctttctttctggtgattgaaaacatgagaaatacctggtttcaaatcattttaatatttctgagtactttaactaccaaatttcgttttcttaatttgcaactaaaaactatattgaaattaccatcagtgaaaagagaaataaaaagtaaatttataccgtgtaaatgtaatagatggcaataaccttgcccttaaagataagactaaaacatctaatttcggtataattcaaatggatgagccgccgcgtagaaatttagtagtgagccttcaaattttgttatcgatagtagatagtagatgtaataaagttgtaaacttctacctaatatctacctctaggaccaaacaatacttcatctatataagaactataaatactataactaactaaactataatgtaactaataacctaatgttgtactctaacttcataggattacgtaagtacatattgaggactatattacagtagatataataaagagtttaatgcataagcatcgagcactctaattgctgaatggataaagaaataaataaaagataaaacaaagaagaaaagaaagagaaaaagatagaaagaaagaaagaaaaggttcatcaatttaaatgctcatcattcttatcaatttgaaggctcatcatatagcttttgttgatttgacatcatcctttaactttagtaatgatatgaaaagatataacatttttacgcaataaactaattgactctaccatctttatttttgtctttattatcagtattatcaacaggattataaacatctttactttctaaaggtgccttatcaagatttttagatatctcactgattaaacagtctgatgctgaacatttaaatgcaacatcattatatactttaccaatcttaatttgataatcagtttcaacggtaaaagatggtaaagaaccaatttagatgattgcttattagacgtttcaacatctttaaataattcctctaaacttctaaacatttcataagtttctttataagatgtctaaacatataaaaaacctctttattgttaaagttgataactccatagtttataaaatatgatttctttttgataaaatgcgtttattgatttatctggaaaagtatcatacaattcatcatcaatcgtcgaattactagtaattgtaaaggtattgtttagtgttattcattatttgtttggtatgataaagtaaatccctaataaaacttataataaaagaaaaacaatcttatcgtaggcgtatcataacgtaaagatattattattaacaataaaaataacttaaagcctatatacccttatacattactataaaaaatatccaaaaaacaatctttatcatattctaaacttccaaaaatagtatttattaatcaaaaaataataatctattcttatcacattgcaaaccaacaattacatataaggaatataactttattgaatatttataatcaactgatttatagccacgtctaccaatccaaaaattatacaatatataggtaaatctgaaaaaacattgtttatcacaaaaccttctcaaacagtttgaacataacacatcattaaatggatgatttaactttttaacaatttcatgcataccagttggaaattccaaatcaatatcaaaatctctataaaatttatcccatctattcatatatctaatatctctagaatttattaatttttgagctagttggagtgataatctattaaaattatccaatgatttatcatcatatttttccataaaaatatcataaaatttatcagctaaaacttcaacatcatcaccataatttaaaactaattcatcataacaatataagaaaaaaggatcttgaataattctatgaagcttttcattagatttattaacatcattcaattgaatatttaatgagtttacattcattctatcccctagtactcttaatgaaatatcaatacttgattttttaaataaagtatcatatattctcttaaatggttgatttgtaactttagaacaacaacaatcatgaccagatgtttgatcattcgtaacataaaatttttcaaatcttttcctagcacaaaaattatctgtagttacaactagaccttgattcctaattctaccaatagattgaattatatcatgatcacggaaagcacaatcatataatatcactaatgaaatattttgtaaatttataccatacgacatattcttggtggttaataaaattttctcattgttataaaatgattcaagtaccaaagttttctcttcattatctaaatcaccatgaagtttatgatacggtaaattcaattttttcaactcttctttagatttgaaaaaaacaatacatctagaagctaatgatttttcaaaattaaacaaaacttctaataagttcaaattctttttagaaaccaagtaaaaatttttgattggcaattccgtaacaaatgaattataattcattcttgatttaatatttaataattgaaatatttcgtaacattcttcccttttgatggtagcagaacataataatattttatcaaattcattaaagttatattgatgaaattcatttataattttcctgcatgaactttctttagcaattaaatgacaattatcaaataaaattattcctttcaaaattttttcaattgaattcatattaatcttattgaagtcttcatatgtacctaaatagcattttttcaaacaactttcattaatatcatcaactattttttcaaaagagccaaaatagccaggatatttctcatgcttatcaaactttgatatactgtaaggtaccactaacatattcaatttattgacattcaaatcaaacattatcttggaaataaaacttttaccaaacccagttctagcttgtaaaatatagttatgattagatccattaatatcatataaacatgaacgttgttgatctattaattttatgttcaattttttcaaatgtttctcaatctgtagaggtgtaaattttattgaatttttattgaaataatattctatatcaccattcgtatctgcagttctatcattactttcagtcttattcaataaatgatcccatttaatcatcattttatgattctcagataaaagaacatctttagggaagtaatcaagatatgcggtaaaaaatagcctaaacaacttaaagttatattcatcactaaaaattccagtgaataaagttctaatagctgcaatatcaattttagttataactttctctttaatcgctatgaacaattgattatcaataaaaatcaagctatcatgatatgaattctcagttttcaaacatttattatcaaaatccttcatttgaaattcatcattttcattaaacttcaaaagtagcgatttaaaatcaatagtatcgtttttcattgatagttttgaaaaaaaactagataatggtaatcttatagtaaaaaaatagtgtaaaaaaatcttagtaacttcaccattgataaatgaaatcatttcattagttgatctttttttaataaagagatgaaatttattagttgatgaatctttatgtataaataaattattgttattttcaccaacctttaaatcaaccaattcaaacattcttaacactccaccagatgataaatacattaacaaaataacaatatttgtacatctattgaataaaccaaaaactttatttaaattttttctaatatcttcattattaattgaataattttctattgattccttaaaattttcaataaaactgccgttatttctatcattaaaaccttgaatcaaagctttaaaagtttcatttattggagataatttgatctttaattttagaaattggctaacagtttcatgatacatagcaactaattttctataaccctttgatataatagtagagttcaataatataccaccaatatagtaatcttcaccttttataataggtattatacgagttttattatcttcattggctaattctttataaactatattgaaattattatagacattgttaactttttcaataactatatcataatataattcattaaattgatactcatttgaatatgataaaatatacttgataaatcgattaattgaatgaattatcttaacagcagatggtatgttttcaatattttttttatcattaattaaacataaatttaaacaaattgaaaatgattcttgatcgtttaataataaagttaaaatttcttgaaacataaaaactttcttaatgagccgttgtttatcctttttgtattcaaatgatgtatactcttcgattcgattaagtatttcatcatcaattttgaaaaaaggtttaaatgaatgtaagttcatgatataagtataaaagtcggatgaaatttgagtatactctctaatagttaaagggaatagcttagcaatacgttcatcaatattagtgtccataattgtgactgagttacaatactgatactcgttatagttatttgtgactaggaaattgatttccaacacttcagatgaatatttatacgagaatggtaattgaatctttttataagtttcaacaaattgaattatattgaaaactttattcaaagttgtttttctataaacatcataattgacattatcatttgaattatcatcacgttctatcaaagttgaagtattatccattgaatcggatcccattatgtaaagtgctgtgagaatatattcttttaatgatagaagaagtaccaagggcaaaaatgattagaatcaaagagatatatcatgtctttaaatagaggaaattgaatgagccttcagatacgaaatgagccttcaaaatggatctaatttactaatttaaactaaattagtttgataagtagattaatttggattaaattgaattattaacatgattatcgttcttaaatgttcctaaatgttcttaaatcgttcttaatgatcactataattgatttagaatgtgtcatactcgtatttatacttagttgaccttgtatatagacagaaccagaacttagatgataaaattataggtgttataaacaaaataaacaatcattttaataagaaaataaatcttaggtaatcaaatttgagaattatataaaaaataaataatctcgaattccaaagtttttggctgcaattttcttcaatgtaatatactctttctttacttaacttaccaacaccagagttaattcctaaatgatatgtttgaaaatccatcttatgaatttcattgaaatttccatgcataactaaaggaaccctatggaaagaatttgtaggttatctacccatttttcaaaaagttgaggaatcatgtgagtaggataatgaaaaaacattcttttaaaaatgaatgcttttcatataaatcttcaatataattcataaggtggataaaattatctttgtgcttaggaatatcatcactaggaacttctctgctgaaaaaaagaagaaggtaaaaattaagttcgaccattaatcttggaaataaaattcatatcagaattatcatcagaatcagtattaaaggcatcttgaaagataaatggaaataaaaacataaagacaattgtatctactgcctttaaacgtttatttggtgagtttgcagtaaaaaaatgtgtccaaatttgaaggttctttgattaaagtttcaccttttcaacaatatccaagtattccttgaataattccttattaattttttcaagataactaccaaaaaacaatactgccaatatccttttagggaaaacaccttcaagtgcaacatgcatcaaatctggacaaattatcttcatgaaatcagattccttatccaaagaaaatgcaaaatcagctttaattgaccattctgtactatttttcttgaagtttttattcatctaccatttttaatctatcttcatgaagtgattattctaaaccgattcgagatctttaaatgataataatccttgtttgattttttgtttcgaactgcaacaggtttattcgttttaactctttaattattattcttactctttttcttctttttagtgctagtagaagcactattcacattattgatattattattgattttattcatattatttacattagttgatattattattaatattcattggatttatattcatattcacattgatattatgattcataatattcatatattattattatttggattattatctgtattattattaattggattattagtattgttgttatcatcacaaaaaatctctttcacatagtcacttgaatctatacgcaactgttggaaaccactttcgtcctcaactatttcaactttagaactctcttctacttcttcgttatcatgaatttgacagtctgatctcttttctcttcgaatattacacaaataacatggatgatttgccgaagcacctgtggtatctaataatgaacatacagccggaatatctgcggtgtaacacaccgggttaatgaatattgtatactaaacaccgtttcttttgattttgaaaccttcatctctcaaaagtttcaaatctacaattaaatgtttcatcatttctctaataactccaggggactttgtaatatacttgaaaaacagtggaataaaatttaaaaatggattgttttcttatctctgctggtaagtcaaaaaattttcaactatgaaacatatagattaaacatttttttatcatgaacattacatccatccatcgacaatctcaaattaaaaacaaaggagtttgaaacatctttgttgatctctttatgccttttgaaatttgcaccttttccaattctatcccaaaattctggatgatcttcatttaattttctttccttttcaattctttccattagtttttcattcaaaaaaaataatgccaaaagggaacgaatactttcatatctcccagtagtgattgttcctgtacataagtttttaaatttttcttaactgtttattttatgctaagatcaagtaaattcataatataccagatgactataaataagaggacatatcccttgttatatttttatattacattatataagttagttcatttaccaagtaaaactatattaatgtatgtattgtgtataagatgctaaacgaatatatttacagttaagttttcttatattgaatatatgttgaatcatcttctaaaaacatttctcaaagatcaggcattctataatttgtttagtgcttaaaaaaagtactggttaagttattaacaattatatctcttgattgatgaaatttgtatcacaagcttaataagtttaatccaacttgtttcaataggaactataataggttaatcatcttaattgtctcatatagatgttttgctaaactttgataaattatgttatcaaaaatatactacttcattcattaaatcaatatgcttcttattaaattacaatttgaattttccttattaccggcaaggacatcttatactcatttatcagtctcataatattgtgctccgacgtgttgctaattatttaatccatatatcagattactttgatcatagaactgatgacctggttaagatatgttcatttctaaaatttaataagagaacctcgtttgatactctattccagaactactttcattattagaatcaaatttgtagtactcagtttaaatattataataaacagagcttttattactccatttcatcactaacaaagaaatattctttcatttttctaattatatcaaagtgaatcttcgaatatttattttcagcataatcaactcattgttaatacaagcaattttcttaattattaatacttatccaggtccttcataacaacaataagtacatcttcagcaacataatagaaaaaataaacaccttcaaaggatgattattggataatttgttatttaatttgttaaaagaacgaaaaaaatgcatagaacggttaccaatagatttttcaaaaacaaaaaaccatttaaactttacaattaacccttattggtaaccgttctatgcatttttcccgttcatttaaccaactaaataacaaattatgtaataataatcaaactagttcactccagtaaatgttcaacccgaaattgatcatttaaatgtagaaagggaagaaggtaatattgttgttattcagataattcagagtcagaagacttaatgttaaatggaggtttaatatgctttttctttcttgaaatgtatttagattttatatgggaacgtttttaagatgataatttccttttttgttttgattggaggtttttcattttctgctttgaagcaataatttagcttttgtagaagacatagttagctagtataatttaatttaatttggaacacaaacactaaccggtgctaccaaatgaaattgagtttatctgatatagttgataacttgatggtagtgataagtatcaaataaattcacttgttggatcttttatttgtgaattggtaggcaagataaaactagacagttggtatatattagttagttcaatactctgattgatgtcaatacaagattatcatttaacatacccgagaaataaccatcataaaataaataaaaatcccaaatacccgaaaaaagggtacttttctcaaaaaaaaaatttttcaatggattaaaataccattagatgagctatgacatgagatttgttgcttaataatagtagtttcacattttgttagctttttgaccacttttaagtagtttaacattgaatatagttaatattagttaataaaacctcttaaagatgtattataattacttatttgaagtaaaaaccctttatttctggtgattgaaaacatgagaaatacccggtttcaaatcattttaatatatctgtgtacttcaattaccaaattttattttattaatttgcaaaataaacctatattaaaaacaccatcaatgaaaagagaatcaaaaagtaaatttataccgttttcaatggaaaagatattaatagctttatccttaaagataagactaaaacatctaatttcggtataattcaatttgatgagccgccgcgtagaaatttagtagtgagccttcaaattttattagatagtagatagtagatatgataaagagtttaatacataagcactgagcaatattgattcagttgatgaataaataaatagaagataaaacaaagaagaaaggaaagagaaaaagatagaaagaaagaaagaaagaaagaaagaaagaagaaagaatgagcaattacttttagtttttaaaaattcaatctttaaataggggaatctaaaaaattgattataaagcattatatttggaattaaagataagaacgattgaaacaataaataaggtaggtaatcactattattttgaaagtgcatcataatcacctaaacaaccacctggtgtaagttcaagagcatatgtttcagctaaataatataaaatattatcagtattaataactgcaaatgatgagttattttcagcatattcaactaattcatccttttcttcaacatattctgcaataaaacctttattaatactatcaatatgtaagaatctatgaaataaatcaatacctgcaaatttttttggaccaacatcagtaatattaccaattacacacatatcttcaattggtttctttgaagtgaaaaataaatcacaaataacagtttcctgtgatgcattaactctatggtaaccaggccaagtattaggatgtgaagcacatgaaccttcaatatcatcacatctataaagtgcaccatcctttttaccttcaacaatattatcaataacacctaaaacagttaatggattaccattatcaccaaaccaatgttcaaatgcttcatcaacaccttcattaattaaatgagatcttgcaatacttgcaacttctaataaatcttcataatatttattaattaatttaatttgagttgcattacaattttcaattgttggataagtaacatcagtccaagttttcataaaatcatcagaaaatccaacaatttcttgtgaattagttgaattagatgttgaattagataatttaactggtaatgctaaagttgttgataaaagtgatgcaataattgaaattgagaacttcatttgatttgttgtttgttggaaaatgataatttctgaaacatgtcattaaatacatggattttaccccagtttaaatagtaaatggttgagttcaattcaattaaactttatttagttaattggattattatgttgcaataatttaattaagtcaaaccatcaaggtacatttgaacttattcggagttctttaaaacaacaaattgtagttattaaatgtaacattcttcatatatgactgttgtaatttaatcatacattcgagtactccaatggttagtccaatataataaagggttcggtaccttaatatattgtccaagggtttaaagaaaaccctttttcacgcaatgttaaaatctccaaaatttaaaaaaattgtgtgcttcttgaggttgctgtaaaaagagttttactagattcctgatacttctcttctttcttctgattcttgtattactctctttagatagggttcaacaactattcatgaggacatatgtagttgtttgatccttctgcctttttttctatatggaatagagttagtttattactatttatgttaaaattttatgtgatgaatgaaatacattgaacgcttgactactgaaattattggatgagaaagtgttatatctgaaatatttttaacataacaagctaattcttcttttcatatactgtaatatactattgtaaacatattatttaactatagaatttacataaaattacgaggaattgtatcttcaaatacttgatcaacaactaattcaccattttcatatgctttacgagtattagttaaatagaaattttctgcatctgcctttaatgttgaaacagtatcaagtttaattttccaattatcactctctctacccatttcataagtccattcacatgtatttatagctgataatggatttaaaggttcaattttccaagtatttttattaatatcgccaaaataaaaaccggaaattttatcattattatttatttctgtacaaccaccattttgaatatctgttaaagtccaaatatctttaccataatcatattcaatatttttaatacgatcataaggtctaatttttcttaattcaatatcttgtttcataattgttggtttaccgaaaattggtggattaattttattattatcattaacaattggtaataataaattacctgaatgtaaagttaaaattggaatttcaggtgttggccaagcttgaggccaatcacatgtagataatgcaatacgtaatttatgacctttttcaagtttaataccaattgcatctaaatcaaccctaattttatatttttcatttggtttaagatatgatgggaattcatgagattctctatgagttaaatttaattgaccccaagaaattaaaacatgttcaccatcatttggatataaatcaactaatctaactgaaatatttgctaattttttatctgatgaaattgttaaatccataaatggtaaaccatataaatcaatatcattttcaaaaatatctgaatcaaagcataaacatttagaatcttcatttttttgatcaccggggaaatcacctttaaaaccaaatggacaataagtacctctaaacataccatgagataaagtaccactaaatttaacatcataatcatcatcaattgtatctgtatctttagattcaagttttaaattattaccatttaattttaattctaaatattttttttcaattggtttattagttgaaatccatctaccttctctagaaatataagaatcttgaattgatgaaggatcttgaacgaaaactgaaagtcttggtaaatttaaattattttctctttcagggtataaccatttagcaaaccatttagttgataattgttgataatcaattttaggtgaaggttctgccatttcagggaattcatgaacccaaggaccaacaatacaggcagaattttcatttggtaaattatcagccattctgaaaacaggatttgtataaccatcacgaaatccaccaattgctaaaattggtatatctaattttgaccaatcttcattaattgaaccatgtttccaataatcatcccttgtttgatgtttaatccaattagttaacattggaggtacatttaatctatctaaccaattttttttccaactatcaccaacaacttttggatcttgaggtcttggttgataaactaacattgttgacccccaccaaagcatatcacttgctaataaacaaccaccacgataatgaacatcatcagaatatctatcatcagttgacattaaagttataatagttttcaaagcaggatgttgtcttgcagctaattgtaaaccattaaaacctgcccaagatttaccaaacattgcaatattaccatttgaccaatcttgatcaacaatccaatcgaaaacttttaaagcatcatcttgttcaattttcaaatattcatcaatcaaaacatcacttgaattacaagaacctctcatatcaactctaattgaaacaaacccatttgcagcatagaaaggatgtctaattgaatctctaataattgtaacatcagttctataaggtatatattcaattaaagttgcaaaagatttagatttatcattaaatgcaccaattggtatccaagctcttgcatgaatataattaccattatcatctaatttaattctaatattatgaacagtttcaacaccgaatggtaaaccttcagcagttataacttcagttaaagcttttgggttattatttctaacattaaaggccattctgtttgtgtgtttgggggagaagaagatgagtagtgctaagaatgtaaaatattcaaggaatacacgaactttaataatagaatacactccgaatgataaacagcaaatgacaaatcagataagaccttatcaaagtgaaaaaactgtcaccaaagacaaaccgtcggaataaacgctttcaaccgccgttcgcaactggcgaaattacccactggaacacattgggggaaagtcctagcgaggggggagcacccctgataagactgattcacagcaacaatagataatagaacttaagatgttaatgttaaatgttactttctctatctattgtcctctagtattactatggtatactgtatgtcgacaagaccgagctgggccgcgatacggttatcaatgacttatcgtcatgtctacaagacttatgatatcattattattaagaaataatgatcatttcagatcaaattgaaaaatatcatattcaaccaaccatttacctcactatctatttactcttatcagttacttctttgatatttttcaccacaatctgtcattctcttttcttttttctttttctatttctatctctgtttcttataaataccaccgttatcctttaacttttaacctttaatcttttgatctattttaactttcttctatcaaactatcttactattactctcatttaacaaaaaacatgtcttcagtagaaaaacaagattataaaataaatgaaacaggttcaagatctgatgatgcatctattgttgaatttatggaaaaaggtgttcctggtgaacttaatgaagatttaacaattgttgaatccggtgatttagtattacaaaagaaaatccatctaattaatgatgcaattgatgaaattggttttacttggtttaatttacaacttttctgtattgcaggtttcggttattccgtcgattctcaaatggaaatgattcaatcttctgttaaaaaatatgttgatttacaaatgaaaggtggtggatatccaattgcaactgaaattttctatgctggtttaattgttggttcaattttatttggttttggtgctgatatgattggtagaaaattagcatttaattcatctcttcttttaactgcaatttttggtttctttactggtggtacttcaagttatgcaatgtattgtatttttatgtttttatcaactgttgcagctggtggtaatattgcaactgatgttgctgtctttatggaatttttaccttcaaaatatcaatatttaaatactgcaatggcagcttggtggggggttggtcaaacaattgcttcattaatttcttgggctttcattccaaataattcatgttcaacacctttttgttcatcatcagaaaatagaggttggagatatgtttggtatgttaattcaggtattgttatgggtgcagctcttttacgtttattcgttttaaaattagatgaaactccaaaattcttagtttctacaggtagagatgaagaagcatatgaagcaattgtgaaaattgcaaataaacataatagaaaatgttcattaacattggaacaattaaaagcatgtggtgaaattgaacatacttattttgattcaagtaaagcaactaatgttacatctgcaattaaagaattatgggcaacaactaaagttaatttagcaattttattctcaaacaaaacagttattagatcaacagttttaattttaacttcatggatgtttattggtatttcatattcagttttctataatttcctttacatttatattgcaactcatggtggtgatactggtgatagtaattatattgtttatagaaatgcaactttagataattttacaggtattttcggtccaattttaggtggtttattaattatgattccaaaagttggtagaagaggtacaatggttttcggtgcattatcaggtatggcaattttatttggttatacaactgttagaactccaagtggtgatgcaggttttggttctgcaacttattttttcattaatgtttattattcatgtctttatgcttatactccagaagttttcccaacaaaggcaagagcaacaggtgttgcaatttgtttagttgcaggtagaatttcaggtgcatttgcaccagttgtttattggtttggtgaacaaagtggttcaagtgttccaatttgggtttgtggtggtattattggttcattatcaattcttgcaatattaatgccttttgaaccaagtaaacaaagatctgtttaatatttgtcttttttttacaatcttttagttcttttaaaaatctctgtttctttacatttcatttatatatataaaaccattatactttattaatatatccgtttaattataaaatcattctatcaataacatgacacgaaacatgctacgtgtcttagagttgcacgtggattgttacatttttcacatgcaatttgaaatttacgttattttttttggaggctcaacacttactaaagaggtatttaaatcaagatgatttcctcttatttttgccagctgttttctcttgaattgaatactttaagacaagatataatgtctgatagtataaacgtggtgtcaaaagataataataatcaatttattatggaaaagagtgattcattagatgaaatcacctctgaaagatataatattgataattcatcctctgatttcgattcagaggagaaaggtgaatcaagtctcggtgatgatttaacaattgttgaatctggtgatcttagtattacaaagaaaaattcatctcattaataatgcaattgatgaaattggttttacttggtttaatttaaagcttttctgtattgcaggtttcggttattcagttgattctcaaatggctatggttcaatcagctgttaaaacttatgtcgatttacaaatgaaaggtggtggatatccaattgcaactgaaatttattttggcggtttgatcttaggttcaattatctttggttttggagctgatattattggtagaaaattagcttttaattcatccttattgttatcatcaatatttggatttttgacaggtggtacatcaagttatgcaatgtattcaatttttatgtttttatctacagttgctgcaggtggtaatcttgctactgatgttgcagttttcatggaatttttaccatctaaatatcaatatttaaatacatcaatggcagcttggtggggggttggtcaaacaattgcttcattaatttcctgggcctttattccaaataattcttgtaaagaagctttttgtccatcttcagaaaatagaggttggagatatgcttggtatactaattcaggtattgttttaggtgctgctcttttacgtttattttatttaaagcttgatgaaactccaaaatttttggtttccactggtagggatgaagaagcatttgaagcaattatgaaaattgcaaatcaatacaatagaaaatgttcattaactttagagcaattgaaagcatgtggtgaaattgaacatacttattttgattcaactaaggcaaggggtattacatcaggtctaaaagaattatggagaactactaaagttaatttaagtattttattttcaagtaaaattgttattagatcaacaattttaattatgatttcatggatgtttattggtatttcatattcagttttttacaatttcttatacatttatattgcatcacatggtggtaatacaggtaatacaccatatttagtttatagaaattcaacaattgcaaattttgttggtattttcggtccaatattgggtggttggttaattttattaccaaaatttggtagaagaggtacaatgatatttggttcactttcaggtatggcaattttatttggttatacaactgttaggaatgcaagtgcagatgcaggttttggagctgcaacttatttctttatcaatatttattatgcttgtctttatgcttatacaccagaagttttcccaacaaaggcaagagcaacaggtgttgcaatttgtttagttgctgatagaatttcaagttcatttgcaccagttatttattggtatggtgaaaaaagtgggtccagtgttccaatttgggtttgtggtgcaattattggatgtttatcaattcttgcattctttatgccatttgaaccatcaaagaagagaagtgtttaaataaatactttttataatttttttcctttaatatattattcttattgtcccttttcaaataaggaaaaatccagtttcctttcttacacgtttaacagaatttatccaagaatcaccactattccaagtatcttttaaaattttaagaacatcaccagcgggagcattaccacctaaaaattgaatattaaatctttcatagaaaaaatcacgatgaattccatcaattgattcacaagctgcaacaaatagtgggaaaactgcacaattttctgtattacttgcagattctatatcatttttaaaatatttataaactttaccaaccattttttgaacaattgaattagatcttggaattttgtaaactcttctatataaatgaatgattcccgaataataaaatacttcatttacaacatttaataaatgatcagattctgttggatcattttcattttttttagaagatttaaaagatttataagcagtattaaattcaaattcccattcaattgcctttgataaaatttcagtcgaaacagttttctgatcttgattttcatcttcctctaccatatttaaaattggaattaatttatcgaaaattataataaaattaactatcaaaacctaagaataaatcaatttttgatttagattctaattgataattagtgaaaacaggatttggtcctataaggcattttgaaatcttttggagaatattgccatcattataccaataatttctaaataaccaatccaattaattaaaaaatatgataatggattattttcttcagatattaaatatttaccatttgataatttaataactttatcatcattttcaatatatttatggaaactatgtctagctaaatcaataatttctttatatctttcaatttgatttcctgaaaagattttttgaatacataggaataaagctgtaatacaagaaacttcactttttaaattaaaattagtgaaaagtctatataaacctcttgaagttaacatgtttcaattaattctaatgagaaattttcatcaaataatactaaacttctatgttgtaaggcatgtgcaactaataaatccattaaacaactattttttttggcatattgaggaattaatatatgcatagggttgtctttataaagtttgaggtttagcacaaacaataaaatgtgaagtaaaatgaacaaagaaaattaaatgcatcattataatatggatgatctaataaattttcaggtaatggtagtaatggaatttcacttttatgtatgaatgaagactactgtattttcatctatactggatattaataataggtttcatcttctttcttatcactttcattattattttcatgagtatcattatgggtatcatcaatattatcactaatcttagatttatcaatttattcttcctctttattgggaatacattaataatgttcatcatttttatcagttttttgatcaacagttaacaattctctatctttaataatcaatttctttttattctctgcaagtttttgattttgaaataccatttcaaatgaataaatacatgttataccacgtttttcgcatcttgaacaagttggttttaattcatcacatttagcctttaattttttacaatcattacaacccaatcgacttctccttttagcaacaggtgtggatttcttcatagtagatataattgcagttacagagacactatctatcgcatactacacactgttgtccaaagaagtgttgatcaattgataaaagataacaaattcatgacatgtagcaaatcagagggttaaaaaatgggacttccgacgggtgcaccgatgtcataatttaaggtataataattaactctgtgattgattattaaggcttagtacactctcttcttatatgtacaggacaatgacagatagagagacagatacagccggtgcatcaccatcagaacaactgctagaggcggcacgtcgaaacaatgttgatcttttacatgaattattaaacaaatatcaggataaacctaatgaggcaattgaattaattaattcagcagttgatgcagcaggtaatggtgcattacatttatctgctaaatatgggaattatgaagtaatggatcaattattagatttagatggtgttaatgttaatataagaagtaaaatgaatggtaatacaccattacattatgcagttttatattcatttgaagatcaatgaattttcattatttttagttaatgaattaattaattgtggagctgattgttctattaaaaataatgataatttaaaacctattgatataattggtgattcaaatccggaaattaaggaagctttagaatctgctcaatatgcatctgttatggattcaaatatagatgaaattcccgatggtgatgatgatgaagcaagtgatgatgatgatgatgatgaagatgtgtgatttatatgggatttattattattattattatgatcactggaaggaatatagatttctaagtttagaagcatttaaagaacacacaacgcacaatgattatttcaaaagtttagcatgtattgtagtgtatttatagtattatcattactttatagcacttatactagtataaaagaacaaataaacaaacagtaaagtcctaacaatagttataataagacccgctaataattatagaaattgcctaatcgggtaacgcggtaaatttgactcattttaaaaatttccaattttttccaattttttcactttttttgataaaaattgataactgattggccatttggttggttgttggttgttcactgttttttctctctacttgtttgttccttttttctttatttctctcttttttttctttctctttactcttcttccttcttacttatcttcttttagtatcatagattaatatgccattagttaacctattgaatactgtgaaaacagcaactgtttataataacaagaaattttttgcattagttgcatgtaatccaattttaagaactaatgtttcaaaatctattaataataaaactttcaccgcatttaaaagaaattattcaactagatcaacagttattcaattattaaataatattggatcaaaacgtgaagttcaacaatatttaaaatattttacatcagtttcacaacaacaatttgctgttattaaagttggtggtgcaattattacacaacaattaccacaattagcatcatgtttagcatttttatatcatttaggtctttatccaattgttttacatggtacaggaccacaaattaatgaaattttagaaaataaaggtattgaacctgattatattgatggaattagaattactgatgagaaaacaatgggagttgttagaaaatgtttccttgaacaaaatttaaaattagttacagctttagagaaaatgggtgttaaggcaagaccaattactggaggtgttttcaatgcagaatttttaggataaggataaatataaattagttggacaaattaattcaattaataaagaaccaattgaagcatcctatcaaggcaggtgcattaccaattttaacttcattagcagaaaattcatcaggacaattattaaatgttaatgcagatattgcagctggtatgattgcaagagaatttaaaccattaaaaattgtttatttaaatgaaaaaggtggtattattaatggtaatacaaataataaaattagtgttattaatttagatgaagaatatgaaaatttattaaaagaatcatgggttaaatatggtacaaaattaaagattaaagaaattcgtgatttattaattcatttaccacgttcatcatcagttgcaattattaatgttgatgatttgcaaaaggagcttttcactgattcaggtgcaggtacattaattcgtcgtggttataaattaacaagttatgatgatttaaataaaattaatttaactttattaaagaaaaatttaattaatgaagttaatgatgttgatgaatatttatcaaatttaaaacctggtaatttccgtatttatgcagatgaaccaatggaagttttagcaattgttaaagaatcagatgatgaataatattgcaaaattagataaattaattgtttcaaaatctggttggttaaataatgtaactgataatatttttaaattattagaaagagatttcccaaatctttattggattgtttcagaaactgatgataatatgtcatggcattttactaaatctcaaggttcatatactaaacctggtgaagttttattttggtatggtataaatgatttaaataaggcaagtgaattaattaataaatttgttggatctaataaagttaatgaaagtaagggaagtaatgttttctctaacaaaacacaaactagatcatttcattcaactagattagttaatgataagaaaaaagttgcacttattggagctcgtggatatacaggacaaaatttaatttcattaattgataatcatagtgaattagaattatcatatgtatcatcacgtgaattagcaggtagtgaattaaaaggatataataaggaaaaaattatttatagtaatttaaattttgaagatattaaaaatattgaaaaaaatggtgaaattgatatgtgggttatggcattaccaaataaagtttgtaaaccatttgttgaatcaattgaagaagtttccacaaagggtaaaataattgatttaggagctgattatagatttgataaaagtggtaaatggacatatggattacctgaattaaagggtagagaaggtattaaaattgccgataagatatctaatcctggatgttatgcaacatgtgcacaattaacaattgcaccaattaaggaatatattaataaaatgagtaaaccaaatattttcggagttagtggatattcaggtgcaggtactaaaccatcaccaaagaatgatattaattttttaaaggataatatgattccatattcattaactgatcatattcatgaaagggaaattggatttcatattggtaatccagttagttttatgccacatgttggatcatggtttcaaggtattgcaatgacagttaatataccattagttgaaaatcatggattaacaaatgaaaaagttaatgaaatttataatgaatattataaaggtgagaagttggttaaaataattggtaatgaaataccattagttcatgatattagtggtaaacatggatgtttaattggaggatttaaaattagtgaagaaggtgatagattagttattgttggagttattgataatttattaaaaggtgcaagtacacaatgtttacaaaatattaatcttgcacttggatataatgaatttgaaggtatcccatcattttaattgtatattttatataaagtgaagtatagtagagtttagtaagagatataatttttcagttaattacgtgaaatttaatttttcatttcatttcatcgctttaagtttatttagtatttatttagtataattatcatctttttgcaagagaatgttatacagaatagggaatcctatgcagggtattcgacatgttatgagagtgaatcagatagtcttctgtcggagggttcatgatgataaattgtcattgttgaagagtatactgaataatcctcaaagtggtaaagaggaagttaaggatagagtgaagtatagtggggataataatagggataataaatatcgtaataagagagatgatagagatagaaatagagacgatagagatagaagtgggtataagaagagagaagggtatgttaaaagagaaggtaataatactaaatatggtaataaatatggtaataaaaagtattcaaggaatgataaatatgataaacaagaggaggtacgtaaggatgaagaaacgttattaaaagaaaagcgtattaaggaaatacaaacagttttcaatacaggtaatgatagagataaggaagcagctaagagaattattaaggaagtacttgaaagtaataagaaaggtattgttcaaattattcgagaaggaggtaaagttgaatattgtcatatttatgattcatttggaggtatgaaattaaatgagaaagggtttttaattgttggtaatagaaatgttaaaggtaggggagaaaatgatgagaatattgataaatttagtttagaggaaggtgagaaagtaattatattaaaagttagtgatagagaacaagttattaaacaatatggggattatttgaatggaaaagtagttgagatattgaaacagagtaatagtaagattatagagaaacaaactagaggtaaggagaaagagagtatgggaaatggaattggtagtaaacttgtacaaattggatggaatataagtagtaatgatttaatgggacaaaagagatttgaaattgagagtcatttaaggagaggagatgatattgatattgtaattgatgatagagaagtattagataaggataatcaatttggtaataatggtaatgatagtaaacaatttgataatattgaagaaaagatggtaatttataggaatagacgtaaagatataaatgaagttgagagattaaggagaaagaaggttattagtaaattaaaggagatgttaagtagcgttgaagggttattagagagtaatgtgggggaggagagaggatatttagagagtcgaatagttatgagggttaaaggtattaaaatgaagagaggtaaagaagataagaaggataggaaagagcagagacagatggagagacagaggaaggccgagaggaatgcacagagaagactggagaagctgaaacaacagcaggagaagttaaaagagattgtcttgtaaatagtcatagtataatacttacgtaatataataataataataagcgatatatccgtagacgcgaccattcattcggcttattccccatttaaaggtctagttacccactcttattattaattagagttattactattagttgataatttttcacttccttctacttctttttatattggatatcttatctttactatatccaatacacaaaccacatgtcacaaactttagagatagattatgaggcattacccgataattcacctctaatgtcacaattaattgcaggtgcctttgcaggtataatggaacatacaattatgtatccaattgattcaattaaaactagaatgcaaactttgaaaattagttcaaatgatggtataatatcatcatttaataaaattagtgcaaaggaaggtcctttcgccctttggcgtggtgtttcttctgttatattaggtgcaggtccagctcatgctatttattatatggttttcgaatcaactaaaactactctttgtaataatttattaaatcataatcatagtgttattcctggtaataatattgcaaatattaataatattaataatatatctaattttattgttacaaatgaaaaacatccattaattgcaagtttaagtggtgttgctgcaactataacatcagatgctttaatgactccatttgatgttataaagcaaagaattcaaaacaacaaccataatatacaaaatttaaaatcaattatcaaaacttcaaaatttatttatcaaaatgaaggtttaaaagctttctttataagttatccaacaactttaattttaagtataccatttgctgcattaaattttggtatttatgaattttcaagtgataaattaaatccaaatcaattatataatccaattatacattgtatatcaggtggtatatcaggtgcatttgctgctgctgttacaactcccttggattgtattaaaactattttacaaactaaaagtttaccaaattcaaatagtttattaactgcaactaatgcattatataatcaaggtggtatatgggctttctttagaggtttaaaaccaagagttgtctttaatgtacctgcaactgcaattagttggactgcttatgaaatggcaaaagcttatttactgtaattttaatcttatattatacaactttcctactaatcttactcttactctctctctctcttttacacttgttaaatagtttatatagatcttttattttatataataccaatcatacactttttatacaacttttgttgcaataaatgaaaatacaacactaattgttataaatcctataaaattaaagaatgctaatcttgaataagatctctcctcctcttcagttctaaatgatgcaaatatattcctcagactttgaaacatgttcatcttaatgtcttgtatacggaataccggtatatagaaaggaaagaagagaagttgtataaattaaacaaatttcgctctttctttaaatgaccgcttttcatctactcttcccttctctttcttatctcttcctatctctatttatcaaagtttttttacaatgaaggaaggtgcattacacagagaatggagtctctggaatcaattgaaattgaataaattgaataaattgagtaattcaaatgttactgatgataataacattaatgataccatcccggttatctccgataccactaatgatattaaatatgattcaccttattcttatgatgaaaagaaatcatcaaaattcagaaatattaacaaatttaaattcatcatttattttactatattcttatctcttttattcaatttccataattttctcccatcaaaaatcaattcatgtcattcaattaattcaaatgataataaaccaaacttttcaatgaaaaattatcaatcaattccaatgaatttccatccacaatcattgaaaaatgtctcatcccctcatgaagtaattgatattccattttctccatacacaaataattcattacctgtttattctcatcaacttttaaatcattcatttggtctttcttggaataaaccaatcttagttaaatattctccacctccttcaaatattacttataatagagtcattttctcattagatactattgttgatggtgttcaatatgatagattaattcatatttatttaaataataatgaaatttggagatcttcaacaattgaaccaagtggtaaattatctcattcttatactgaaaaggatatgaccatgtattctaaattattccaatcagaaggtgatttattaattcaattagataatataattactccaaaattaacaggtaaatttaatataactatttcagcattatattttaatgaaactgaacatccaatcaaaaatatctcaggtggtaggaaaaatagaactttagctgatcatcccgatttaattcctttaactcctaataaatatggtgtacaatatccacctatttcatattatcctgattcaaaattatcaatttcattacctgaaattaatcttaatacaactcaattaatggttcttttaacaacttcaggtaatgcagcagaagaattttggtattctaatttaatggatcaatataaagattcattccttgcaaataatcgtcatttttatggtcatggttcttgtagaattattaatgttttcattaatggtattagagttcattcaacaattccaaaaccttatattttcacaggtggtattgcaccaactttatggaattcaattgtttcaactggtagttttaatataatgccatatcatattgatttaacttcaattataccattattatgggattcatcagctgattagaaattgaaatttcaaattgtttagatgatgatgataaaactattgttaaatcaagtattggttcaaattggattacttctgcttcattagcaatttgggaagatgaaaatattgataattcatttggtgatttaaatattttcgataattcaactgaaattaaatcatttgcaattaatccaccatttacaggatttttaactcaaattattaaggcaaattataataatatccttacaaagtaatataactcatgtttataaaaatggttcagaaattagtaatttaagaaattatgaaaatcattcaaatgaaacttcagttattataattaataaatttggtgataatcaatcattaatatttgcatcgaaatcaaatacaacaattaatgaaattgatccattctctgaagatatccttaaaggattttcacaatgttaactaattcagcattagcaacttcattaaaattactccaccagatgatgaagatacgatggttgatcctgatgatatttcatttagtactaatgtttcacttaaaattgaatcaggtgcttatgaacatttcataccattagttgaaattaaatcaaaggaaaatggtactgctgattttacaatttctaaaaatggtaattatggtacaggttctatgttacataattatacattatcagatattcagtggattaaaatataatagaattgcattagctgaaaatgatacaattgtttatgataatattactgaatcagattcaaaggcaacaattaaaacttcaaatcatttaccttgtcatggaaataattatttattaattaatgaattaggtttaagtaatgaagaatttgctgaacttgaatcaattttatcagaagatgaattaaattatcttattaaagcattaattgaaaattaatttaataattttatttaaaacattcttttttttataacctttttacacttttttatactcttactttttacaattaaatttttttccatattattactaaattaaacaacaaaaaaaaaaacactatagaacctaaagaaaagcaaagataactgattgtaaacgattgaaaaaaaaaagagagaatgaaaggagaattttaaattattgtgattgacgactatcttttgataattgttcattattagctgaaccattatctaaatcttttgtatacatttcaatttctttccaaaattgttgatcatcctttgaatttgcagtatttataccattatttgaaaaatctctaataatttgcttttcaggatcattaattgtattcggtaattcactttcactaattgaatttttatgataataatcagttggtgaactaacaaatgttttattatcttcacctgatgaactataaattggtgattgagaaattgatgttggattactattcataattgaagaatttgcccacattgttgttaatggtaatgaaattgtaattaatgcagtaccaagagctgaaaatgcttgtgatgaatattgatcagtttctgaaaatccattaaatgaaattaaaattaaaattgttggtataaccattgtttgaaatgtcataataaataaaatatgaaataaattaaattgtgttaatccaagataacgacgtgtacgaattgcaaatgcaagttttaataataacataagacaaattgcacatgatgatgtaacaaataaaattaatggtgtattaactaatttttttcggaactgtaacattattattgtaaaatgctaaatctgaagtaaaccatataaacaaaatataatacaaatgatgcaatacctaataaaattgaaattaaagttgcaatatatccaattcttttcaatgatttttgtggtgaatcaaatataacataaacttgataacaaaatgatgtttcaactaatccaattaacataacataaaataaattagcaacaactgatatattacttgcatttttatcaatattttgaatacctgaaaaattatatccaattgtattataagcttttaactaatgtaactgcaaataaacatgattgtaaaaataaaactccaagacatgacatattaagtataaatattggtagattttttatttttagtaaccataaatgtaactggtaatgctaatgctgataatccaattctagttccaaatataatacctgtaacaacaattgtcttcatataactatcaagtaaacccattgaaatttgcatatcacccatagttggtgatgtaaaatttaataaaatttcctctggattatcaagtaattcagatgttggaaaataatcttgtatattagacattgtttgaacttactattccttttttgattaatgaatgaaaacctaatgtaatttatttgaaagattcaagattttgtaggaaaaaaactagaaatataccatctttattgcttatattgaattaattaaatggaaatctttttcatttaaacgttttcaaaagaaaagaatcattacaataattatcagtttcatgtatgaaaaaaaaagtttgaaaatgttgcatatcaataaaatttcctttttaagacatgtcaatgtattttttcataacattcttttcaaacttgatcgataagaaaattttcttccccttgattaaatttcataatcattagtaaatgatttccattcattaattctcacaatatgtctcatcgttggtctaccatgtggacaattccaaggtttatctaaagttgctaaatttttaacaattttttccattttcaggtctatttaaagattgtccaatcataatacttgatctacaagctctcattgcaaacattgaacgtactttactaggtctaggaaatgttgtaaatgcaccatcttgttcaccaactaattgaataagttcatctaaatctttattattgaaaattgtatttttagaatatggtaaggaaactaaatgaatttcttcttgatgtgcgtcatcagatgtcttatctccattatcaggagatttagttttaaatttgaaaccatttttttcgaaaatgtttaaattatttaaaatcgtaaatttatcaattggtgtaatatctaatttttgtgacataactaatggttgattttcaaattgagtttcagatattaatctctcaaaattaaacttttcatcagatgcatgttgatcaacaataagtatatcaccagtgttttcctttaaaactatgataaaacctttattgaattgtccaataatttttaattgtaaaaaatcatttttattaattgataaacctaataatgtttctgataattccttatccataaaatctgatttttcgactgaattattctttgatgtggttttatcttcagtacgtcttcttttggatatagggaatttcaaatcgttcaaatgaattctaacttttttaggattttcaggcgaaatggaattagtatgattatcagctatttgagatgatgtatcaattagttctttttcaagaattggaaggtcatcatatacgacttcatctttaagctcaggaacaaataatgattccttttcaatttctggtacaaataatgactcatcttcattattattctcatgagaatgtgaacaacaagagtgaggactatgcttatcttttgtttccatattaatatcgacatctatattttgttctgataaaaaatcttcgtttttcatactctcatccctagtatcatttctcacataatgatttgcaataattgaacttctatcatcagtaaaattatcagttgaatcaatattactatcaatattctgactatcttttaacactgcagtatcgttaatactttcatcatcaacaatatcatcaaccaaaatttgagaagtttcaataactcttgaatttctaattgatgctctttcaacaacatcaatttcaaaatcatcttcaatttcaatattaacatctgtatcaatattattttgtgatgaattatcttgaactaatgcaaatgaacttaatatttgttgagaatatttattaattctttgagaatcatcaacttgatgtgaattaaatggtaaactataagtaccaccattataccaaaaatcttccaagaatataacaattttttcaaaaagtaatttttcaaatttatttgaaagtaaaatagttctcttatcaggagttacattaatatctaataaattttcatttatttggaaattaagcataatgacaggattctgtaaataattcatcttcttatatgtttcatttattaattttaataattttttatattcaacaggtctattatttatgaatataaattgtctatcctttgtcaaacgaccatcaccaaaagatgcttttgatatcataccattcattttaaccatataatcattatttaattcaagtgatttatcaatttctgttaaaccatctaatcctgacgacccataaacattaattatattatctttgatttttttattaccacttgttttcaaaacaacttttttcttacctgatatatcaatattagtaactaatattctaacattagttaaaataattaaataagatattaacatatcaatacatttttgaaattctttcctatacattttttcaaaattaagtttccttacaggtaagtctttgaaaatttcagtaattttaacacccgtacccttactttgattaaccatttttttatttaacaattcaccactttttttaaatgttaattcccaaccctttggtgcttcagttgcaatcgaagtcgttatgactatatcactaatattacaaattgaattcaatgcttcgcctctaaatcccaaagttttaacactaattaaattttcaaatttctctaatttggacgtataattcttcaggcaaatattattaaaatcttcattacttataccatcaccattatctaaaatttcaataccttcaagtccatattttttaaaagtaattgaaataactgtagaatttgcatcaattgaattttctaataattctttaacaagacttttaatttcagttatgacttgtcccgatgtaatgttatgtacatcatcggtcgatatacgattcatcttcattgcctaaaagaaaatgaagtagtataattattaaaataaaaaaattacgcgtaatataattctacaacatgaaaattccaacgtgttttaatttatcaccaactttattttcttgtgtttcttttaaaatatataatgacagataatctaacacccagtgagttaattgatgcaataacttcctttttacgagtgattattgaacaattatggtatcaaattgaagtttatccaagagaatcatttgaatcatgtattttttatgatttagaagttaaaacaacaagacatccattagttaaggcatatcttgatgaatttattaatagtattacaaatttatttaatgatggaatcataagtaagatttatttagaaatatttgagaataatagtttaaaatattcatttggtataagtttcaataattcattaattttggatcaattaaggaatgattcacaatttttaaaatctgataaattaaatgacttgtttaatacttttaccatagttaatgaactgaaaagtttattatattcagttattgttgaatcttctaaattatctaaaattgaacaaaattttggagattttaaattattattagcaactactgaagatgaaatggtttcaagaaatcaaaattggatattggataaaagattgaaacaacaaacaaccgatgatgaaagtacacttaatgatgtagatttatatccattgaaagaagttcatttggaatacatcaatattcaaggatacattgtatcatataagtaatagaatagaaaaataataatacagtgaaatatttttataaatacaatatacaggagcttaaatttagtatcaacttattttagatatattcttacttattagattagccttatccataccaccaatactccaatcttgaacaattaatataataaaccaaacacatagcaaattgaataaattatgcaagaaatataaatgtcgtgtaccaaacaatagtgaataaatcataaaatataaaagaacaagctgtgttacaattatattaaaatcagtctttggtcttggaatcatatacccttgatttaataattgaataagtataactattggtaaaattgctaatatattatgatgagatgaaaatggtgtaatccatctaatcgatatatcatgaatccaaacaattaaaacaggtacatgaattgcaactaaccaaaacattaacatcatcaatgaaaatttgaaatttttgaagttctctgttaatatcaataatttttcctttgttataaccttaccttcatttatatcatcatcactattactattagaatctgaacttttttcctttgaatgtgtataatttttaaatacacttgtagaataagcatttaaatttggattggcaataaatgaatttaacgttgaaaaaacttgggttaaaacacaaacaataaatgcaaattgataaggtaaataaattaaaacaagcaaaattaatgaaataacactaatagttttcctttgctttgaaaaatttttaaattttggtaatttgactgatttccaaattgaaagttttgataattggagtagtaatattaaaactaataatattaaattgtaaagtaaaaaatttaatccaattgaaatatataaaataaaagttccataaaaccataatgaaatttcttcaattcccataaaatattattaatttcaactttacttttctctatattactcatcaaatctaaatgattaatctctaatggattaaatatttcaataaatttaccaaaacttaatttggttgatgttaaaaatgataataatgaaaaaataattgataaaattgtaattgttttcaaactacaaatatataacattgtttcaccatatgaaggatatttattatattttgtatattgaataaattgacataaaataattaataatgtaaaaaataatgggaatccaataattgataatctatatttaacaactaataagcttaaacttttaaaccaatcaactgtaacataaatatccattatttcgtcagatgataatgaatcagtaaaaattttgaattttgaacttgaattcaaatcattaacaataaatggtgtatacggagaatttgaattgaccattgaagttatatgtttatttgaatcgatgtcaatatgccatttaacttcacctttaacagattgacttataattggagaaaacttttcattgattgattttttatatctaatatctaatctataagctaacagacttgatctaatcgaaggtatatcaatatcaattataattggtctatgaacaggtattgttatatcattaccttgactaattaatttccacaaacttgaatcacctgcctttagtttactcaaactttctaactgtaaatcagctaatacaaaatcatcatcactcattatatcagatacatcctcagactctatcataattacattattgaaagaatttaatatatttgaaggtaattctaatgaataataaactttattatcagtataagataatggaataatgtatgtatatttattaatatcaatgcattctaattcagcaaatttcattgtatcatcagttgtataatcatatatttttttataataatttttatctctaatatcttcattaagaactgatctacataataaaattgaagttgaagttgaatcatctaaatcctctattgaagttggttttaatgaacttataaaattaaatttatagttatcatcttttggaatattaaataaattaattggagggaatgaatttaaatctctctttatatgattttttggtaggtgaaaaaatctttgattggttgaatctttcaattgctttaaatcaattttcaatttataaggtacatttaaacctagttgagtatctgaaattatatttgatgatttggttaaattaggtaataaaattgatttaaaaatttccattctcttatttaatggataagtttgagattttgagtttttatcaacaattgataataaagttttagataaaactttccttaattgatcacaccaaacaattgccaaatgatcaattggagtccaaacttcaggtataccagttgttgaaactgagaatccatgatttgaaggaactaaaccagttagtgttgtataatcagttggcaaagttgtatctaacataccaccagttattgaaattaatgatacattagataatctttttcttgcaattttatttaattttaaaattttattatgcttgttatgtttgttatgtttcttactaattttattatgaatattcatatcaatattttcaatttcatcatcatcattttcatatgcaaaacctttcatccaaaattcatcagttaatttgaaaacatttaataaatctgtttcaaaagtagttggagcggcattatgaggagttgataaagttataatcgtattaattgaatcttctaaataatttggtaaacttaacataactctagcaactataccacccattgaatgacttaaaataattactgaagttggataattatcatttgaattatcatttgatttatacaatgataaaatgaatttaactgcttcatttaaatattcagattgatctaacattgttctaccatggaaagcggtaaaatcttcattaaaatctgcagtgaagaaatccaaattattagtatttggatttaataatttaatattattaatattatcaaaatattgatcagcagtttcagctgcaattgatctaacttgtttataactacctgcattaccaggtataaataatactggagtaccagttaaattgaaattttcatttttaccaggcattttatccttcccctgttctctataaagatataatgaatattttgaagcaaatcttgtatatgatgaatcaaatgcacgtattttagcgtaagcagggttcatatagacacctttacaataaggtgaatcagcacctgaaaatgggattgtaaagctaaatgcaattaataacattgtgaataaaccaattaaggaagttgttaataaaactgttttatttgatacataatttgtattattattaatattgttattttttgattttgagttatatttttcaggtattgagaacatgatgatttattttaatgtatgataaaaatgtcaatatggattgtgtataaagttgaaaaatgaaattaaatatgtaagaataaatgaataaataaaatgtttatagtgaatatgaattgaaagataaaataaaataaaataatgaattaaattaaattaaaaagaattgaaaaatacaagaacaatatgaatagtagataatgtaaatgagtgaatatagtgagaaatgtaattatatcagttgataattggtatatgatatgatatgatatgatatgctatgacacaaataccaacagaaacagcacaaggtaagagagataataatcaatccaatactgttttagtgtagtataagcaggtgtattatgataatacaattgccaaatgaaaggcaaatgaaaagcaaatgaaaggcaaaagaagaacgttgaaaagccttcaaagccttcaaaatccttcaaaaaattgcccttttttcattcattcatcaccttattaaaataaattaaattttaatattaaaatatggtgatgagccacataatattccaccgacgcaccgacccaccttttttttctaaattacccggcatttttcctattttttttaaatttttcagtagagactacatgaatggacgttgaattggttagatattagatattagatattagatattagatattaatctggtatattcttattttaataggcaatcccatcttcattatatagacatacatcaattatgacaaggagagctcaaaacctcaattctttagttcgtggaagaattagatcttctatgaataaatataatttatttaatttatataaaaagaataaaccaaattttaaaattatgactttatatcaacaaaaatgggctgcaaagcaagaaactagaggttatcatggtgaacatattagagaagagagatggcaatcacttttcgaaaaaaaattagaaggtgttgctcaattagatgcttcactaaagggtaatgttccttcaactccaatggttttacaaacttttgcttcattagagaaaagattagattatgcagttttcagatctttatttgcttcattctgttagacaatctaaaaaattcattcttaatggtcatgttaaagttaatggtgttataattaaacatcctggatttcactttaaatcctggtgatatattctctgttgatcctgaaagagttttagaagctttaggtgctaaaaaacctgcacttaaggaagcttataaagttgataaattacaagttattaattggcaaaaatatgttaaatcagttcaagaaaatccaagaaaagcttgggaaaagaaaatggaaaaatcaaataaaattaattctctttataaagattataatgttgaaggtgttttaaagaaaaatgaatctgattttgaatcaaagaaaaaccgataatcaaaatgttaaacttactaaaatgaaagaaattcaaaattcaattaatagaaaatcaattcttagagatataataaagacaataccatttgattcaactgaaaaagtagaaaattctgaaccttttaaaaaacaatttggtgataaattatcactaaaggcattccaaatttatcaaagcttaccaacaaagataacctaaattacaattagataaagatattaatgaggaaataaataaatttgtaccaacttttaaagatggtcaaccaatcggtgaagtttatgaagatactaattctaaaaaaattagatctcaattatctgaacttcattctgaatatttagaaaaaattagagttgattttgctggaaaacctttagcaactgatgaattaattaaaatatggagtgaaaatatcaagagacatccagctttacctccatttagtgaagttgaagaaaaaggttcatattatttaagtttaccatggcaaaaaggtatgtatggtttacttgatccttcaaaatcttattttactccttggaaaccaagacaattcttaccagttttctcaattttaccaaaacatatagaaatttcattttcaacttgtcatgctgtttatcttagagatcctgttgcaagacctggtgaatctgaagttatctctccttacgatgaagatattcatgaaagatcttacatgtattacattaaaaatggtatgtaatgcaatctaatgtatgtaaaatttaatataaattctgtatataatgaaaagaaaagaaaagaaaaaaatataaaattcttaaaacccacttcagttcgcataaaagtttcattgatcctaaacacttctttttacttcttcatgtcaaaatcatctcttatcagcttattaactaaatctttttctaaagaacaagcaattagagaattacaatggattaaaaatgaattaccggaaaatcaagtggttaaatgcgtgtaatttaagatcaaatcatgttccattacaatatattttaggaaatcaaccatttggtaaattagatcttatatgtagagaaggtgtattaattccaagattagatactgaagattgggttattgaatcatctaaagtattgaaagatgttaaaattaatggagtattggattattgtacaggttcaggttgtattggtttaagttatgcatctgaattaaatcaagtatcgattgttgattgtgttgattttaaggatgatgcaataatattaacaaatgataattataaaagaaacaaagatagtattttatgtgatgttagagtcagtaaaggtgatctatttgatagttatataccgaatgatcaaatctacaatacccacactaacaataatttattagtttcaaatccaccttatataccattaaaggatcttcacactgatgaagttgaagaaagtgttcttaaatatgaaccaagagaggccctattaggagatttagaattttatgaagcattatgtgaaaatattcttttaaagaacaactcattcaatggatttatttttgaattaggatataattcacaagtcattaaagtaagagaacttttaaatccaaaaatctggtcaattggtataagaaatgatattaatggtaaattaagaaatgtgataggttggaaaaaacaatcaagtcttaatgtattacaaaaaattgtacataaggaaaattctataataatacttcaaatctaactagattcaacatcaggcgttattgtttcagctgcaatttcagcaattggagttgattcactatcatcatttacggttgttttagcaattttcctctttttactacctctaccaactgcaacaacattttcaatagggaaaactttaataccagttaaaataaatccaccatcacttcttgatgtcattaatggatgaattctaccaggaattgtttgatattttctaacaactgtatgatgaatatttggtaataatatattcttttgtcttaaaaacatatgatttaattcaattaacatttccttaaattgattatatataattaatggtgatgaaccacgtaaccttggtaatatttttggtacaaatgttgcactatttaatgttgatgcatagattaaactttcaaaatcattttgtaaaactctatcaattacactattaacaatttcagttctttttactttcctttgataatgaactttcattgcatctgataattttgaatattcttcatcagttaattccttaataactggtctctcctgttctggatataaaaattgtaagacattaatacattgaaccatacttgttgggcttgttgctatttcatttgcatatcttgtcttatttaacagatgtatactaggattatcattttcatgtattaatgtaattgtacctctattacccattttctctaacattgcataaactattaaacctccagtttcatccaatactaaataattaccacccggcataacattacctaaactcatcattaaaccaattgtttcaatacttaaattcatgattttaaaaggttccttttcatgatataaatattcaagcatttcatttgatgttaaataattaatttggaaacgacgtaaaaatttcttatgtttacgatcaagatatttctcttgtgaaaatgctgtctttttgtcaaatgatgaatgatttttaatcattgattgaataatttcttttgcaatttcattaccaccaactttattcttcatttcttcaatttcttcaactgttaatttttgaacatttgcttcatcaactaataatctattatcactacttgatccatttgataattcttcattatctaaatctgttaaatctgttaatccatcttccaaactcttgattggaattaaattattattttcattaccaatttcaaatgcttgtccatatggatatcctaatacatcaattatattgaaattaccaaatttacccatattaattacaccatctgaacgtaattgtattaattttcttgaaccggatggtaaaaccaatattgcccattcatcctctgttatatttgtattcggtctataatccttcatccccgtgtcctgttagttcgatctcttaacctactgtatacttttattatgaaaaaaaaattattttaaattacccaaaacgtcagcattgaaaaatattttttttttctttctgcatgaaaaattttatcaatttctattatcactatagttattgtaggaaccttttatcattacatcctttcgtttacaacactatacacgacaatgggtaaaagagctagagagaagcaaggtgttccaccttcatatgaagaatttcaagcggcaaagcaacgtaaggaagacaaaaagtctaagaaagattctaaatctaaatcaactgaaactgaaactaaaaattcaaataagaaacaaaaattcgataataaaaaggatcaaaagaaggaaaagaatggtaagaaatctaagaagagtaattctgaagatttagatattactgaagctccaaaagatttaccagaagttaattatgaagaattatcagctgcaagaaaatcacttttcgatgatgaatctgatgaagaagaagaaaacccaactagaccagaagatgaatttgaaacccttgatgatttagatgatgaatttgatattgaagatgaagctgatgaaaatgatttacatgaaaagccaatgttctcagatgatgaatcagatgatgaaattgaaaaagttaatgctgctaatatggaagaatattctaaacaactcgatatggaaagagaacaagaagaattagaagcagaagaggaattattaggtgtaaatcaagttcaacctcgtgctaaaattttaccaccgccaggtgaacaagatcctgcaagtgaaactaaggatggtgcaaaagatttaacatttattagaactagaatgttagaaattgttaaagttttagaaaattttaaagatttagcagaagagggacgcaatcgtagtgaatatattgatcaattaatcagtgatatatgtgattattttggatatacaccatttttagctgaaaaattatttaatttattttcaccaagtgaagcaattgaattttttgaagcaaatgaaattcatcgtccaattactattcgtacaaatacacttttaacaacaagaagaaatttagctcaagcattagttaatagaggtgtcaatttacaaccaattggtccatggactaaagttggtttacaagtttttgattctcaagttccaattggtgcaacacctgaatatttaagtggtcaatatattttacaagctgcatcatcatttttacctgttatggcattagatccacaagaaaatgaaagagttttagatatggcagctgcacctggtggtaaaacaacttatatatctgcaatgatgaaaaatactggttgtgtctttgcaaatgatgcaaataaggcacgtaccaaatctttaattgcaaatatacatcgtttaaattgtacaaatacaattgtttgtaattatgatgcaagagaattccctaaaattattggtggttttgatagaattttattagatgctccatgttcaggtactggtgttattggtaaagatcaaagtgttaaaactaatcgttcaccaaaagattttattgatattcctcatttacaaaaacaattattattaagtgcaattgattcagttgatcataattctaaaaatggtggtgttatcgtatattcaacttgttcagttatggttgaagaaaatgaatcagttgttgattatgctttacgtaaaagacctaatgttaaattagttgatacaggtttaacaattggtaaagatggttttacaagttttagaggtaaaaaatttgattcaagcgttaaattaactaaaagatattatccacatgtttataatgttgatggtttctttgttgctaaattccaaaaaacaggtccaagtccattcgataaatctaagattggtgcatatgagaaggaaaagatggcaagagaagaagcattaaaggaaggtttaattgctgatgattttgctaatttcgatgctgaagaagataaagaaattatgaaggaaaatattgttaagaatttagaaaagaagggtattgacccaagaaagattgatttagagaaaaaattagaaaagaaagattaaacaaagttataatttctctttgaatcaaattaattaatttatttcttttctaattaaccaccataatttatgtaaataatatagtaacattttttttatatacaattatacaattaataaatataatacgtacaaaaaagttttaagtaagttttatacaacctaatccattctctgtcatgtaactaacaccaagttcttcatattgttgtttagtccaaaaaccttttaaattattatttgaataatcattaaatgcccatttagacatacctctccaagcatctaatattggatcatttgcaattctaacattaaaaggtctatcagatggtaaaccagtacgaaattcattaattaaacgttctttaaaatttgggaataatgctgatccaccagttaagaaaatattatcataaactttagcaattttttcattgtaagaattatcacctgaaaatcctaattcttgaggtaatcttcttaataatgtatcctctgcaatttctacaataccagcttgatcaatacctgaaattgaaggttgaaacataatttctggaattctaattctttcaacatttaaatggatttgatgtaattgatgttgatcttcattatcaaaatctcttggacctcttaaaaatttatgaattgttgaagttttataatcaaattgacgttcctgtgtatcatccattgtaaaatttggatcaaattctaataattgcttttcaagtgtataaatttcctctaattcctcagctgaaatttcttcatcatcaatacctgcaatatctctataaactgcccaatcatcatcatttgcaccaaaagtatcatttggatcattatcaacagttgcaggtttattattatgacgtcgtttacgacctcttctatcttcattatcagatgattgaactggcgcatcatcagctaatgatgcaatatttttcattctcatttgtgatgctttagatttacgatcatttaaatcatcctttaatttgattctatccttacgctttttaacaactttttcaagtctttcacgttttgatttgatccagttttctaaatcatcttctctaaacttaatatctttcagtctcaattcttcagcttcacgaattgcttcctctttttcttgtctagcacgtaattttgaatcaatatttgccttaattaatcttaacctacgtttctctctctgttgttcagttgttaattcggaattaggtacatctaatattgagaaatcatatttatttgcgtcctcatcttcatcattatcattgtcagtatcatttagtagttttgccttttttaaagatttttccaatgtttctaagtatttatctaaatcatcttcatcatcgaatcctgcctcacgaatagtttcaataatttcctttttacttaattcactaaaactttcctttattttactataatattcaaaatctttttgctttaattctaatttttcaattcttttcaatttagcttgatcttgtaattttttaatattttcctttcttttaatttcatctaatctaatttgttcctctgttttttcctctttaataatttcattaaatggtgcctcaattgttatatcatgagtttcaagataatccatatctaaagttttttcaatttccttactgaaatcttttgaaacataacaatgatctttaactaattgttggatttgccaatcatttaatcttgttgggaaataaggatatttaagacctaatgaacttctcatataatcacataattgatgaccgccaatattaattctctttgaaatattatgtagtggcattgaatctaatacaggtataacataatttgattcatgatttgtacctaggattaaacctgatttataaccattttcataaaaactgaaaacagaatcaataccaaaagcaattgatggtatatcataagattcgaataacatttgagaaattgtctctctttgagataatggagctgctaatgattcattcattataattggattattaactctattatttgaattaacacctagatgtaaaaatgaaaaatcaaatattttctctagtgaatcccaatttgttaacatttgaccatcaaatggtgatttcatatttgccttaacagttgattcaaggaaaacgtcattacctacaaatgttgtttgtttattatttttcctatctctatatcttgcagttaatgttggataattaagaaatggatctattgtgcctgccataccaactctaacattagttttacctaaatcaattgcaattggcacattttgttgataatttgaattttcagtatcgaaaggtaataaaccttcaggttgaggatgatctggtaatggataaactttccttgggggcaagttttcatctcttttagcaaagttatgagagaaattattctctgtcatagatgggttgatatgtgttgtactatgagtatattcacagataaaagagtatattatacctctaaattcactctataaaagtcaattcaccaattgctatgtaaatttccagtgtcgctaattgaataccctgacatgacactttgccacctttttaccactgcttttcttatgttttgattagttgcttctacttgttataaggaattaagatatcaattgacactgaaatgtctgaaaataacaacttctctattcaaggttttaaccttgtcactcttttgaaacgtttagaggctgcaacttcacgtcttgaggatgttactgtttatcatgagcaaaatgttgcaacaatggcataccctaatggtaatagttcaccaattacacaatctacagatgctgcacctgcaattacttctgcgcctgttactgcaccagtttcaactccttcaccaatagttgatgaattatcaaaatctattaaagaatttgatttatttattgatgaaaagatcaatacatacgttgaacaatcaaataaaattgattcaattttaggtgaacaagcagaagttttcaaaaatgcaattttgaaggaaagaaatttattattagctgccagtaaatcaaagaaaattgcattagatgatattaatttccaaaattctgttattatgccaattaacgaattaattatgaaagttattcaaattaaggatgataatagaagttctaaaaatttcaacttatcttaatgcagttgcagagggtgttgcagttttaggttggattgttacaagtacacctgtttcatatattccagattttaaagattctgcacaattttggactaatagagttttaaaggataataaaggtactgataatgaagaaaatgcaacaaattgggttaaaagttttttaactatttttgatgatttgaagaattacgttaaggaatatcaaactacaggtattgcatttaacggttcagaagattttgaaactgcttttaaatcagttaattcaactgaatcatcaactccaatatctacaagttcagttagtagtggtggtgcaccaccacccccacctccaccacctcctccaccagctgatttattcgcagaagaaaaagctaataatgcggtagcggcatcatcatcatcaacttcaacatccggtatgggggcagtttttgctgaattaaataagggagaatcaattactagtggattaaagaaagttgataaatcagaaatgacacataagaatccagaattaagaaagaaatctgttccaatgccaccaaagaaaccaaagaatttaagcagtggtaattcaaaggaggatgttaatgttgataaggttgttaaaacctaagaagacaccacaaaatgaattagttgataataaatggatgattactaatgtaactaaacaagatattactgataataataatggtatgattataattgaaggtgacatggatcaaagtgtttatattggtaattgtgaaggtattgttgttcaaattaagggtaaagttaatgcaattagtgttaatatatgtaataaagttggaattgttattgaaaaggcaatttcaagtgttgaattaactaagagtaataaatgtgaaattcaagttattgataatgtaccaattattaatgttgatcaatgtgagagtactaatatttatttaagtgaaagtgcaattaatgttgaattatatagtagttgttgtacctgcattaaatgttaatgtacctgataaaactaatgaagatggtgacttaaaggaattagcaattagtgaacaatttgttactagattcaccaatgatggacgtcaaaccactgaacctgttcatcatggatgatatgatataatatgatatatgatatagttatttacacttactctccatgtttattgtgtagacaagaaccaaagaattattaccttttgtgagaagtcgaacagagaactttactcactttattagattacgtaacacatagtaaaatttaatttaataactttatcccgggaaagtcggagtgcggtgtcggacccggtgatttgcattttgagtgaattattggggaaaatttccagtgtatgagagtgtatgtagatagggatgtacagatagatagtagatacacacagtgtagagtatgggatcagcactggtgataacaaagagaatgaaactaagaataacaacttggaatgtccttccctatacagtaaaattaaattaatttaatttaattactatttgaaagggcgacgttaatttttttttatggagaagtactcgatgttgatattaatttgattttataggttgttggggtataacctctacttctctttttttcttttggtatcttactctataatcaataaccacaatgcttagatcatccgcaagatcctctgttaaaacctctttaaaatctgtttctccaaaatgtatgattagagttgctgctccttcaattaaggtaaattcagtatctgcaaaaattcaatcaattgcatctccaattgcattccaatctttaagatcattttcatcttcctcatttgttaatgctcctcaagttattaaagtgcccgaaatggcagaatcaattactgaaggtactttaactgctttctcaaaagaagttggtgaatttattaatcaagatgaattattagcaactattgaaactgataaaattgatgttgaagttaatgctccagtctctggtacaattactgaattattagttgctgctgatgatactgttaccgttggtcaagaaattgcaaaaattgaaccaggtgcagctcctgaaggtggtgcagctccagctccaaagaaggaagctaagaaagaagaagctgctccaaagaaggaagaatctgctccagctccaactccaaagaaggaaactccagcaccagctccaactccaaagaaagaatctactccagctaccccagcttcaaatgattcagctaaatcaacttcaggtaaattacctgaaaatattaacccattcggtaacttctcaagatctgaagaaagaattaaaatgaacagaatgagaatgagaattgctgaaaggttaaaggaagctcaaaatactgctgcttcattaactacttttaatgaaattgatatgtcatcattaatggaaatgagaaaattatataaagatgaatttattaagaaaactggtgttaaaatgggtttcatgggtgcattttcacgtgcttctgctttagctgcaaaggatattccagctgttaatggtgcaattgaaaatggtaatactatggttttcagagactatatggatttatcaattgcagttgcaactccaaaaggtttagttactccaattgttagaaatgcagaatctttatcaattttagaaattgaaaatgaaatttcaaacttaggtgttaaggcaagagatggtaaattaacattagaagatatgactggtggtactttcactatttcaaatggtggtgtctttggttcattatttggtactccaattattaatattccacaaactgctgtcttaggtttacatggtgttaaggaaagagcagttgtcgttaatggtaaattagaaagtagaccaatgatgtacgttgccttaacttatgatcacagaatgttagatggtagagaagctgttactttcttaagaactgttaaggaattaattgaagatccaagaaagatgttattaatgtaaataatatcttttagccgtttacttctcacttaatgattttcattgtttctaattgttggataactattagaatttaatgtaactcttatttatcaattttattatatataattattagtatattttattattttatttattaatatcacctattcattgaaactattacgattgtgaagatacacgagaaaataattttttgaaattttaaatgttgtaattactgttcttctttttaacaaaaaggataaaccccttgaatatgttggtgtaatagtatgaataacataaggaaactggctaatttgcaaaaatacttcctatatacagacacctcaatcacaaaagctccatattttgtttcaattgcattagaaatcgaagttaaacaatcaataaggcaaaaattaggtgaattagtaagtaatgttaataaacaattaactgaaaacagttttaaaatgaaaacgggtcactatgatcatattcaattgaattacacccaaccaccatgcaatttcctaagattggatctaccctatgaaaatgtatgtcaaattgatttatcaaataacgatgtctcaaatattgtagatcctactgaacgaatatacagacaatattttgagaatcagattattacaactggtgatttagaattagatacttggtggccacttaaatatacatatttagcatacggaatacaaacagtcaaatttcatgtaactttactacctaatgttctgttcaatgaaccagataatgcatttaagttctttcaaataatgaaaaattcaattggaaatactaatattaaagtgcctgttaaatttaacaataatttaaaagtattaagcaaatataattacgagaagtttttcctagctttatgtatcgataaggaagatccaataaataataatctcaaagatttactcttaaaaatatcagatacgagagaaatgattgattcaccgtttattcgtggaaatgttatcggtgaaatggatgataatcatatagttgattggaaaaacagtgtactacatacttcaataggagtttcaaatgtattgaataatgatgatttacgttttggaccttttgaattgttctttctaaacaaagtgcttttaggagatgaaaatatgattgatttaaatgaagtatttgaaggttctcttattttgactattaatagctagcaaactgtgtataatgcagtttatctttgtgtatttcatgtagtggacgatcgacctgtctgtcttcccaaataggcaattttctgtgtttcaatgtttttcatttgatctgtgtttatctttttcctaaataggtattttaattgaattgctttaattaaatttgttttacagtgacaatcagcatggtatcttagataaatcatctcagaaaaaggtttcagtaattttgtttcttgtcctagaatcctattgattgggttttgataatattttcttttattttgggcttgtacatttcttaccttacctttgcttttttgagtatcaatttattttataatagattttatttgagtctaagaacaaatcacacactcattttaaataccaaactgaacttagaagcataattttatcaaaattaaagcaaaaacaatcaattgtggcattcaattactaattttaaaaagctacaaacacatatttacaaatcttgtataattaaacactcaaaccaatctaaaagtaatcataaatacctatacaaaaaaactaaaaagctttcactacagaaatgaatttcgaatggagggaggattcactcaatcctttcttaaccccacctaataaaggtttatcaaattatcaatttggcaaacaaaatccattaaaagcagatggtgattttgaaacaataaattctcaatcatctatattcaaaccaatcccattacctgatgatatattaggttttgatccaataccatcagattctcgtttccaatttgaaaatccattgacaatgcaaattcaatcaaattcacaaactaattttagtgaatttttagcaaatcaagaaccaatgtcaattccactgaatggacaaaataatcaatacccatatcaaaatactaataataataatagttttaatattgataattacctcaaaggtagtaatactgattacaatgataatgatttcttaggatctgagatgaatttaaatttgaactataacggaaacattaatggtaaagaaaatgatattgagaaagttatgttggatttaggtatatccgaagcacccgtacaaagtcaaacaactcaacctaagaaaacacatagacgacaattaagtggttctgaaatttttgggattgttggatcagcagataatttacaattgtcaatccctggtttagaaactcaatttttaggtaagaaaccactttataaagacattaaaagttacgacaatttggaaattttcaacaatgcaaacattgataatataagtgtacctccgattgatatgggtcttgatgtaattgactattgcaatgggattaaataataattacaatttggatataaattcaggtatgaatatagaaacaaattacaatatgaacatgaatgtgaatctaaattcaaattcaaatatcaatataaataatagagtgaataacaataacccatcgacaccaattaaagcaccaactccgttatcaagaaaagaaaaacttgattattacgtatcttctggaaatccaaattcatataaattcccatcaccgcctaaaggatcatttacaaacaaacctataacacagcaaaatatatctaaaatacccacagaatcttcaaattcactagcaaaagttaaatcatccaactccaatattttggataatttcttaactgatgaatcatcaccatctaaaacaaatttaccaactccggtacctacatccccattaaattcagttgcaatgtcttcacctctcaaaaacaactttcaaacccctaaacaaggatctccaagaaaaatctttgtacatacacagttcacatcaggtaaaaaagttgcggatgaaacaattgtacttgatgatgatgataaagatcgtacaatatctgaaatggcaactcccttaaatggtaaagtaaacattttaaatatgcaaacacctacaaagaaaaagaaacttttaacaaggttacaaaattgtgaagatgcatcattattaggatctccaatgaaaaaaaatatatttacacataaatcaatcaaaggaccaaataaaacggcaataagaaagaaaccaactattacatcaacattagcaagtggttcattagaacaatattttattggtccaactcgtgaaggtaaatatatttgtaaattttttgataaggaaattcaaggtgtttgtaatagagaatttcatagaatttcaaatacaagagcacatattcaaactcatttatctgatagaccttttgtttgtgatgaatgtggtaaagcattcgtacgaaatcatgatttgaaaagacataaaatgggtcataaagctgctggaaatgtttgtccttgtggtaaaggatttccaagagctgatgctttgaaaagacatagggcaagaaatatttgtgttggtggatttaataataaaggtgcagttagtaaaccggaagctacaggaaggtaaagctgttaataataaattatcagataaaataattgcatctatcaataataatccaaattcaattcaagttaaagatatcaataagcaagaagataataaaccaaaacaaccaaaacagcctcaaaccgatcatcaacataattgtcaaaatcaatcgtgcaatcatcaacatcataatcataattataatgattcaagagactcttatgactacaaaaattatcaacctagtcaaggaacctctaaacctatcagtcaaccaaaatcaaattgtcctgatgaattggaattatttgaatttgatgaaataccaggagttgataataatttttcctttaatatggaggatagtatagtgatatgaagttacaagttttgttaagttcgataccataaaactcatatcaccatacccaactcccttattactgttgctttttataatttttttttagttttatttacagtcttaaaaaaatatacacaattcttaagtaaaataacagtctataacaaaaataaataacaaaatgaatgaataagtaaataaataaataaaatgtctaatatggtaataccattggtaattctttggaattcatcataacctttagttgcaacactttcaaatgatttcttaattaatcctctaacataaactgatgcttctttatctgatttatgaggtgcaaatctttgagttaaatgtttaatggttgcagctttaaaacatggtaatccactctctaacatcggaataaccataccgattaatgaatccatatgtaatctgcatgcaaggaaacatttaacacataattcttcaaaccatttataagcttgtgtattaacattaccacccataactctaaccatttctctagttagtttaaatggcgattgttcaaatttaacaccacctggaacaatatcaaaacaaaatccaaaatcaatatgtaaaatataaccatcctgatcatacataatattaccattatgtctatccttgattgctaataaataagtaataattgaataagctgcaagtgatttgacaaaattaattctagcacgttgaaattcaggtgatgtctcagatccaaattgtgaaataaaatattcatataatccattaactgcttctctacctaacatatctcttgaaatagatcttggtaaaacatcaataataccacaacctggtgcagttgctgtaactctatatgggaaaacataaacatcaacacctgctgtcatccaaatagttctaaacattgaaattaattgtaatgctaaaacatcttgtctacaatcatcaccaactttaaaaatagcactagttttaacaatttcataagcttcatctttatcattatcatctttatcattatcatcagtacttttttctacactttcaattttctttgcatcttcaattgaatatgcttctttcttcttcttaatataaaatgtggccataaatggtgcctttgcatgagattgtaatggtttacctgattttctatcaatatcaataacagttccatcaggattacttggtaaataaacaccttcttcaactttaatcttagccatttcttcatcaattttggccttcttttcaggtttggattttttaataaatggttttaatttacctgaaatacctgtaacatcaccaaagaataaaattctttctcaaaatatgctctatcataatctgaaaatcctttaatcatagtttctctaatttcatctaatgcaggtttaattgaatcaggtattgttgaatcttcatccttaaatgaatttgctgacatattccaaataatttgatgtgcaaataattgtgaaacattagcagtttctaaaataaatctacgatataacctaaatcatcatgtctaatagtttgaacaatttgtggaacataaaaaaatgttaaatgaacatcaaaactttcaattgaacgcattgaatattgtaaaattaatgaatttctattatatggtggtaaaaatttattaattgcatcaactggtgaagctgatgcccatgcaacaattgcaacaacatcactatcactaatatatttgaaagctgatggatatttagcaactttaaatggatttttgataattaaagattttaaagttttaatcattgataatgggatattattcattttttcaaatcttgaaattaaattgactgcataaattccatcaattaaataagcatctctaagtatcttatcatcaagtttatgattactataaattttagaggatgcaccaactccagataatggatgaatccaagaacttaaaatattaatttcatcatcaataaataataagagtataattttccttttttcaaaattaacatccttaaattgaatttgactaaaataatttgcaacaatacttaaaacttctaaatctgctttaattttcagtttattattaccaaatggtgttgtgacatcttttttaaaccatgataatgcaccatctaataaaattttaataattttatctttcattgagctatttaaaaaaatatgatgttttagaatttcacaaccaaaattaattaattcaaatctaattagacgtgcaaaagggtgtaaacttgcagattttaaactttcaattgcaattaaaattgaatttgtaaacatatttaaaatatttgaactttgatgtaatgttgcttggaaatgtgatgataaaaatctgattaataataaatgtgacttaaatgatgaagatacaactttagctttactactaacaattgccttattacttggtaaatattccatcggattaaattcaggatctaacaaatcattttctcttgaatataaacctttaccttcaaatgcagttttttcaaaattttctaaaatatatgataaaagtaatgaagaatattctttctttgaattcattatattcaaccaataaccaattgaatgttcaattgtataagaatcaaataatttaaatggaatattaacaatccatttgacatatttagctgtttggttaggtattgtgataattactctgacaatatcatccattaaatcaacaaatttatgatgtaatgattcattattagattttgaattaattttattaataaaatttaaaattttttcatctaatttaatgaataatttattaatatcacttaaacctgcttcaattatttttgaatctgatttccatgtagtttgtgataagaatcctgcagttgaatttaatttctttgattgaaatccttgtaattgataaaattctctatcatttgataaaattttacttgccatatctaatgcaaatgaaacaccataattaattgttctatgtgatgcatctgctttcataacataagatcttaaaactgatttcatatcaccatcacataatcttaaagtatttgtaacccaacgtgttgcatttgatgtaaatctatctaaagtttcttgtctccaagtataagaatcagataataaaagatcgatatctgtaactcttgatttaaattgtgtcattggttcatattcattagtatctgcatcaattatactttgaaacaataatgctaaaatatccagtaatgcaaaagtactaatttcataacataaagctgaaggaatcttagataatataatgtcagcacatttgaaagcagtattttgtaaatcaatattacgatgacagcaaaaaatgaaaattgttttcaatctatttgtaactttttccattgaaagatatgaatttttagatgacatatcatgagaaaattgatttgtacaataattagcaattaatgaaacattattatgtagatttgcaattataactgaaggatcagacatatattctaaaattttagaacaatcacctgttttaattcttaacatttcaaccattaaagttgaagataaaaacattaaaccaggtcttgacatttgattatcagaatctaatgaattaccacttttaattgaaacaatatttttcaaaatatctttatgaattctttcagttgtctttgatgtaccacgtcttaaaattgtattcatttcaattgaagtttcagttctattccaagtatattcagatgctaaaggtggagtactatgagcaattcttaataattcaggtaaacattctttatataatgatgaattataagcaaatccatgaacagtcaaattgaaccaagcatcttgaaatctacgaattgtttctttatcagttggaattcttggtttttcattaatatttggtaataaattagataaaggttttaagaaaagtataatttctctagctgattcagtaactagttgatttgatctatgatgttctaaatcatcgatatcaccctttgaaataatttgtaatagtaaacctttaagataaattgaatataattcttcatttttagattttgacatagctcttgaaaatttattccaagtttcaatacttaatttaaaaccttgactatctttaattgaagattctgaaacatcataataatattttaataatgatgaaaagtcttttttattcatattatcaacaaattcagttaaaccatctaataaaattgaatttaattcaattgatgatggtttaattttttgataaagtaatgttgtaactaaagttaaaattgattcatcatcagtcgattttgaaatttcaacaactgagataacaaaattttttgcaattaaatcatttctttcaattgctaatgattcattagctaaacttttatttgaatttaaattatttccatttccatttccattattattattattattattgctatcattatcaatcatgttaatcagtgtataaattaatgaaattaaatcatcctttgataaacttttcatacaatgtttaatacaattagcaatttttttaacaaaatcagttggcataacaatattttgaattataattgggaaatgtttaacaatattaaggaccagcaatttgattttcctcggaaagaatagcagcagttgcaaatacgttaattaataaatttgaactaatcatttccaaagccgttgttgaaccatcttcaattgaattcataaaatcagataaatatttaatgattttatcattcaaaaattggaaatttaaatttgaaattttaacatttaaactataaatttctaatgaataagcattaattaaaaatgatgttttacgacgataaattgatgaattaataattctatctgaagaattagaaatataatcgtcaattttatattgataattaagtatttcattgaaaatttttgaatttttctctaaaattgaataagaaatattttcataattcatcaaacgatcaattaatgattgatccttaactgcatgaatgataaattttaaataattaatttgtaaattttgaagtaaatcaatgaaatataatgaagaatattctatatttaaatcattaaagttataaatcaattcaatatcattttcattttcaattttagttaagatatgttcaattgaattgaagaaattgttattacaaacagatactaattaagttaaatatatcttcattgataatagatggagtatcagtaagtgcattaatgaatccaattaatgaaaattgatgatataaattattagataatttcaaatttgagatataatcattaaaagtaatgtaaagtaattgattaaattttgggaaattaatagttaaatgaattaatgctttagtaatttgataagttaatttagtccaaggggttatatcattctctaatttaaacaaagttaatgatttaaaagatttatttgatgaaaatataagatatttagataataatgggaataataaatcaacgtaaatttcagatttaaaatgaattgcattatcacaaactgcgaaaagaacgtttaattcagaattagttattgattcatcagttgaagattttaatttagataggattaatttaaaagaatctgagataatcaatgtatcattattattattatcaatatttacatgttgttgttgtttagaagatttagcacataataaagccaatttattccaagcttgggaccttgtattgaaattgggtaaactgtgagatgttagtatatcgattttaagagttgattacctataatacataccccagaaagtccatactggatgaattgtagaaagaaagcaagtgaaggctctgtataagttcttctcgtggtggcgatatattaagttgaagtcttatagttgcccctttttccaattatttaagaaattatgattattacgtaagataatttataaagaaaagagctatttatacagttataagatataggatactatacactattatgaataagtttcaataagagtatctcttaagttagaaccaatagcatcaggttgattatcttgtaatctaaagatactttctataacagataattctggagctgttgtatctaaacctgcaactgcaagccaatcattaacaaccatacctgcaccaacaacatttgaacctctattaacagtacctgcaacaatgggtacttgtaataagtgatgataattcttcttgatcttgtattgaagtttgaggatgaactaaaccaccttgatttgataatgaacaatatgaaccaacaaggacattacctgcaattgtttgtttgaaaacttctacacctaaaacatctgcaataatttcttcagtttctctttcaatatctggatgtactaatgcaacataatcattacaacatataacattacctaatgctgataatctttcttcaattctttgaattttaacagtatcaggaattgaatttcttaaatgtaataattcttgatctgttgtttgagttggaactaataaacctcttctattacctgcagtcatacgaccaacaattctagtacctgcaatagttgtatgaataattggtataacatcacctaattctgcttcaaatgctgaataaaaattttcagaacctccaactgcaactaatgaatatgagttagttaatttggaaaaaacaccaacttcattactattttcaaattgtgctctagcagccatatttatattaatatatactgtgtatgatcttatgaaagaagaaaagtgttataatgataaataactaaatatacaatttccaaccattgaaagtgaaaaaagcaaaaaaaaaaatttctctctctctctcttactaataataatattaatagtaatataaaataaccactcgcgaaagaccgtaatataaataatataggaggcgtttatctcttctttgcaatttaatatctccactggctcatcttaaactaacaataaccaatgaatagacaacgttcaaagcaatcacaatttaaaatagtactcttgggagaatccgctgttgggaaatcttcagtggtacagagatttgtgaaaaattcatttgatgaatacagagaatcaactattggtgccgcattcttaactcaatcaattcatttatcgaaaaatgatatattaagtaatggcgataacaatattaacacagacaatatcgatgatgatggtatcacagttaaatttgaaatttgggataccgcaggtcaagaaaggtatagatcattagcttcaatgtattatagaaatgctaatgctgctataattgtttatgatataactcaattagagagtttagataaagctaaatattggattaaagaattacagagacaagcaaataaggatacaattataatacttacaggtaataaattagatttaaatgatgaaaggaaaatttcaattgatgatgtaaatgaatttacaagtatttataatttacttaattttgaagttagtgctaaaactggtgaaaatgttaatcaattatttaaagatattgcaattaaattagttatcaagaatttgaaatcaaataataatttaaatactacaaataaacattcaaatactatcaatttaaatcaaaataccaataatactacaaatgatcaaaattgtgcttgttaactaaattatattatactatattatattatattatactatctaaatctattaataattaattgatcaggtccaacttcctcatattctgccttagaaacccataattgatgaaatgtacctaatgatgataaaattgatccaccaatccatgatgcatatttcctttcaattgaattaccagctgaatgaactctaatttttaaacttggattatttaaaactaattcattatttaacctctcatttaatcttggtattaatgtacttgatcctgttaatactatattattagctaattgaggttttaaatcaatatctaaattatctaatacattttgaattaattttgttaatccaacaggtttatcagtagtagtagaattaccattattatcatcctttggtattatatcaccttgtctgttatcgttattattattattattattattattattattattattattattatcaccaccttcttcttcttcttcatcttcattctttttacctgttgatcttcttaatggtatataatctttattagttatttcatttttttgtatatcgaaaatttcacttattttaccagtaaatggattctcataattttcaataacttcccttgttaataaatcatctggattaaataatgaatttgataatttttgtctctcaaattgtgtaaacggaatattttgaccatttggtaattcaaaccatctagtttcttcactttcaacttcatttgtaatattattactttcaatttcatcatccattgtacattctaataataattctttcatttctcttaatgttctcaaatatgaaaaatcaataactgattgatcaattggattatcaaattttttcaatgtaaaaattgcttgatcatgatcaccccaataagttttacttttattacttatttgaaattgtggtatataagttagtgatttttcatttaagaatgattttaattgcatattaagaaaattaccagcatattttgttgctctaacttgatttcttaaacataaaccatcaataattggtgtaacagttgttaaatcatgtccaatatcaacaattaaacaattaggtctaccatgtgcaaaacttacacatgttggttgtttaacagtatacattgcacaataattttcagtttcgaaaaaatattccattgattttaatttattattataattattaaatgatgattcagttaataataatggttgagttgatggatcaatttctaatttgtctttaaaatattcatattgttttgtgaaaatttcccaatcattgataatattatcagaaataattgaattgattgttaaatttgatttactatttgaaaacattacattttcatcgaaaattaattcatcattacttttaccataatatgatggtaaaataagtgatggttgatcattacctgcataacctacttgtgttgtataagatcctggatctaacactatagcatctatctcatctgctccatatatctgtggtgctgctgtcttctccatgtctattggtctattcgaaaagaaacatacactgttgtgccaatatgtcttgaattcagcgatatactaaatttgaaaaatctctaattacgttagttttataatttatattggaattgaattcttgagatttataaaaataataataataatagtatataagctacatgtatgaatgaataaatatattatatatacaacatctaagcggagacattaacttcagttgataaaatatctaaaaggaattgaatttctaatttacgtctagcatctacaatccaatcatttgcaatttctcttggaacaccctttaatgatgtaacttcttcaactgcatcatctaatttatttttttgtaaataatcattaacccttgcaataactgattcaacatcgttaccaataaattcatcttttgttttaattggtacacctgattttgaccataataattttgatgccaatgatgatgaaatataacctaaaatacctggattttcaggtaataaagaaactgatcttaattgtggtattaataattcccatcttgataaaatttgtgattgtgttaaaacacctccattaagtaataattcattagttgatgggaatgattcaattgttgtattaattaatttattatctaatggttcagataatttctttaagttagaaatttcctttactaatgattcacctctaatatcacttggagagtttgatacaattaatgaattaattttagataaacaaattctaatttctttaaaagttgtataggataatgcaacttttgataaatcattttccatttgttcaattgttttaattctatcatttaatgcctttaaattagataatttaccatttctttcagtttcaattttttcattgattgaatcattaaaagttttcaataattctaattctttttgttttaatttattttcatattctaaatgaattgtttgttcaattgaatttttttcattttcaattattgccttatgtttagattctaaagatttcttagttgcttcaacagtttcagttaattccttaataacagcagttttctcagattcaaaactttcctttaaaatttgcattttttcttcagctaatttatcaattgcattattatcaatagaagttcctttctttacttctttaacagcaattggcttaaaagatttaattgcatcctctaattgagtgatttgagatgaggaaacttcacttgattcattaatatcagagataagtttattaattgccttaacaagtggctcagcatccttacttgaagctttaagtaaaggaatttgagctttcttaatatttttatcaacaatttcagttgttggaacagctggaattggatcagaattagatagtacaatataattattatcatcctttgaagctgttgatgcctttacaggaattttctttttaattgattcatcatcaacttccattccaactaattctttaactttattaatattagattcaatttgttcaacttgttcattataataacctttataatcaaaggatgcaatatcatgagcaatttgagctctatgagtccaaacataatcagttttatctaatgcccattcaccacctggaacgtattcttggaaaggttcctgtaatggttcataaataagcgcagtagcagatgcggtggcataaacggcagcggtagcagcagagaccttagtgaggaccccaacagtcttaaaagtagatctaatcatctttgtctgtgtagttaaacctataataataatataatacacctatatagttaaacctctctctactgtaatatgtccaatttctcaaaaagctcattcattcattttttgaagcactgggaaaattgccattttaatttccaattggtgaaaatttattcttttcattaagatatatcataagaacagtatactaactagacatagagacaatatgcaagctcctgttgtgttcctcaatactgctactcaaagatcatctggaagagaggctcaagttgccaatattgcagctgctaaagctgttgctgatgttgttagatcgtgtttaggtccaaaagcaatgttgaaaatgttattagatccaatgggtggtattgttttaactaatgatggtcatgcaattttaagagagattgatgttgctcatcctgccgcaaagtcaatgattgaattaagtagaactcaagatgaagaagttggtgatggtacaacttctgttattatacttgcaggtgaaattttagctcaatcttatccttatattgaaaaaaatattcatccagttattattattcaagctttaaagcaagctttggaggatgctttagatattttacattctatctcaattccagttgatttaaataatgataatcaattgaaaactcttatatctgcttcaatttcaactaaatatatttcaaaatggtctgataaaatgtgtgatttatcattaaaatctgttagaagtgttttagttcaagaagagggatcaccaatggaaatcgatttaaagagatatgttaaaattgaaaaaattccaggtggtgaaattgaagattcaactgtacttgatggtattttacttaataaagatgttgtacatccaaaaatgagaagaaatattgaaaatccaagaattattttacttgattgtccattagaatataaaaagggtgaatctcaaacaaatgttgaaattacaaatgattcagattggaatagattattacaaattgaagaagaacaagttaaattaatgtgtgatgaaattttaaaattcaaacctgatttagttattactgaaaagggtgtatcagatttagctcaacattatcttttaaaaggtggttgttcagctttaagaagagttaaaaaatcagataataatagaattgcaagagcaacgggtgcaactattgttaatagagttgaagatttaaaggaaactgatgtaggagaaaaatgtggtttatttgatattaaattaattggtgatgaatattttacatatttaattaaatgtcaagatccaaaggcttgtacaattttattaagaggtccatcaaaggatattttaaatgaaattgaaagaaatttacatgatgcattagcaggttactagaaatattttcttagaaccttcactttcacctggtgcaggtgcaactgaaatggcaatatctgttggattagctgaaagatcgaaaaaaaattcaaggtgtacaacaatggccatatcaagcagtaagtgatgcatttgaagtaattccaagaactttagttcaaaattgtggtgcaaatccaattagagttttatcacaattaagagcaaaacatgcaatgggtaatcatacttgggggattgatggtgataatggtaaattagttgatatgaatacttatggaatttgggaacctgaagttgttaaacaacaaacagtgaaaactgctattgaaagtgcttgtatgttacttcgtgttgatgatatcgtcagtggagttcgtcaaagtgcttagtttatgtactctatctctatattatgtatatataacatctataatataataaattaacatctctttatactacataaaatactatattagtaatttttcatgtgtcgtgataatttattatggaatgtattttgtctctttttctgaaactttattttatcctgaacagtgaaacaatgatgattagacaggatcataccccagttctatccagtcgttctcgtagttttagtgaatctcaatctcaagctcaacgttcttcaagagcggaaaagagaatgggtagattgtttcgtcaaaatacaacaactgcaaattcatcaaataatttaaagaataatcaaattgatgaacaaccattgactatattgtcattatctaaacaatatgttatggtttatcaacagatgaaagttacaatacaattattaaatttaaatcaaactttacaaactaataatattgattcatttattgaagtaattgaaaatacagagaaacatttatcaacaaaattaaatgatgatatgccaattgattataaaaaaattaaaacttatttatcaacatcattatcttcatccatacaggaattgaaaaaggtaattaatatattgaaaacttccataaaatcacaacaacaacatatcccaatattcatattaagatcaactttttataatttattctcagatgtttattgaactttctaacatagcacaaacattaattcatatagtctgaatcatcaactctatcaaactcatcatcaatatctactaataataatatcaacaacattctaaattctcaatctactaataaatcacctgcttcagattcttcaacaacttttattcctgaacctaaactagatagacaacattcagatttagcatcagataatgatacctctggtgataataccaataataataataataataataataataataataataacagtactacagactcattgttcaatcttatactgcaaactattcaagctgcacaaactgtttatacacaaattgatgatgcaatttctaaaaattcaattaatgaaaatgaatcacttgatccattccttgatattgaaaatacaatttctaaaattaaagaattaaaatatcaatgtgttgcatcaatggaacaaacaaaacgtgtacgatcattacttaaattatatgaaaaaaattcaaatacatcaaatgattttgaattaaataaaaatatttatgaacaaacaaatattttccttaaatcaattattaatattttagctgcaactaaagctgcaattactaatgtaccaacattaaatgatgttagatcatcattatcaattttaactcgtgcaagtaaggaattaacaattaaattagaatcaagttcattgaaaaagtttgttattaataatacaccttcaaatacaacattaattgaacaaccaaatttatcttcaataccttcattaccttcaataccttcaattcatgatactcaacaagatgatcaacccgtattaatgaaaaaacattcaattttaaagaaaattcctgaacaagatgaatcttcactgggactgttaaaacaacatattaaaaatcttgaaataaatacaaatttcaataataatatgaataataataatgaaccagataatgatgcaatggtaatgcatactccattagctgttacaactccattgattgcatctattggacctgcagttgcaagtgcagttttaccaattaaatcaccattaaagatggcaagtaataataatggtacatttaatattaatgatgcttttgaacaaaataataatagtatggaatcagaatataatccatttgagaatttaattccaaaagatcaatagtattgtttctgaataatatgtatattctatttaattaattattaagtttataaaaaaattaaaaaaaatcaaaaaaaacctgtgatattatatttacacgtgtaaagtataccttcccctacttcattcatcatcattaagtcttgaatatgctgattgtctattgaaaattctccaaaatctagttgaaaatcctttcttagttttattattaataataaatgaatctaaatcaaattcattaatttcatttcttaaatctgcattaccatcattccaaccaagattaacttcatcaaaattaaattcaagtaatttttcattatttttcttcagatcatcaatattccatcttttcaatcttaatgaattaacaacaactgatgttgatgaacatgccattgctggcacttgcaaacataggatttaatgttctattaaatggtataattaaaatacccattgcaattggtaacatgaattaaattatagattatggctaacatgaaatttaatctaattgtatggaatgttgatcttgaaatatctaatgctgcaaaactacctaataatccaatatgtgaatcattatttgactccattgttgatgataataaaacaatatcagcagcactcattgcaatatcagtacctgatgaaatagccataccaatatcggattgaactaatgctggtgcatcattaataccatcaccaataaatgcaactttaagccctttattctgtaatccttttatatattctaatttcatttcaggacttgattctgctaatacattatttagcggaatacctaataaacctgcgacatattttgaagtttgaattgaatcacctgtaaccataccaactgaataacctgattgaataaatgtttcaatagttttcttggaatcatcctttaatgtatcagataattctatgaatccaataaatctattattaattcaaaatataacaaattgaactaattttcaaagattttgtattttcattgattgattcatctaattcattcatattgataacgtcaaatgattttaaaaacttagagttacccagttttacatcaagtttttcagttggtttctaaattaatacaatttgttgaaatacctaaacctgcatgagtattaacatatgagaattcaaatggtattatttcattattacctaattcattcaaagatcctttaactaatgctttagatattggatgttcactatttgattcaattgcatgaactaatgaccaaatcattctattatcgtttttacttaaaaacttataatttgttaattccatgacaccttttgttaaagtaccagttttatcaaaaatgatagtatcaattttattagcattctctaaaatttctccacctttaattaaaataccgttagttgcaccaacacctgtaccaaccataacaccagttggagctgctaatcctaaagcacagggacaagcaacaacaataactgaaattgcaatttgtaatattttaaaatattgaatttcaagtgttgaattttcttcattttccttaaggaaaagttttggtatatgatcaattggagaacaataaacgtacatagtccaaaaaatcaatgtaattaaagataaagttaaaatcagaataacaaaaactgaagcaattgaatctgaaattcctttgaattggggcagtagaaatttgtgcatctttaactaatttaacaatttgttgtaattgagttttttcacctaaagttgtaactttcatataaatagtagatgtaatattaactgaaccagcaattaatggagatccaacatcttttataactggtaatgattcacctgttaataaagattcatcagtttcagatgatccaaaaatacataccccatcagctggaattttagaacctggtaaaataattgctaatatcacctttttgtaataaatcaatagaaatttctctttgttgaattgttgaactatctaatgaataaattgaatttttttcattatcaaaatatttgaatcttcaactataatacatgatgatggtgttaatgataaaagtttagataaagcagatgatgtattaccctttgccttactttcaacccatttacctatcccaacaaacaggaataacattgtagaagtatcaaaaagaacatttggataagtatctgctattaaaccatggaaaacacttatgagggaataaaaataaataattgtagttgaaaaacaaattaaaacatccatactaccagctttatgttttaatgatttataagtattgatataatatttctttcccagtgaaaattggatatatgtacttaatatcagttgtatcattatatcaatataaattcctctgtaaattttaaatgaatttaaattccacttgaagtatttacgtagaattggtaagatatgtgcaataaacataagtgggaaaccaaatttcagtaaactgaaaacattatttttccaatatcttacttctttaatcttagatattaaatcaacttgtgaatgaagtatctaatttattgactaatatagcatcataatttaattcattaattttctctattattattcttacaccgataatatttgaatcgtattttatatgtactatctctgatgcaattgaaactgtacaacttattatcccatggcaacggcattattacattttctatacttattgaccaagttggtgctaatgaaccatgaattttcaagtcaatatcattaatatcagtggtggtgttggctgtggatactaccgctgatgtaacttcatctactttgataagacttgcatcaaatcctacatcatccacagtttccaatatttcctctacagttatttgcttattgaacaatactgttgccctttcagttaataatgatacattaacttcctctacaccattaagttcctttaatgcattagtaattgaattaacacaagcggaacatgtcataccgcctattgtaatttcagctttatagctaatatcattaattttatcattatcacgtaattctaatgacgatattaaattaccatcaaatccaagatcatcaatggtatttagtatatcatcagttgagatactattattatgaattattgtagcttcctcggttatgagtgatacatcaacactagaaacaccttcaagtttcaaaagttcattagtaattgaattagtacatgaagaacatgtcataccacttatttggaaaattgtcttaaatttagataaattatttgataatttctcaaatttttcatttgttaaattagaattataacttgaatcatcagttgaagaaatcagtgatccatcaaatcctaaatcatcaattttttcaagtaaatagtcagaagttatttgaggattatgcttaataattgcttcctctgtcagtaatgaaacagaaactgagtctacatcatccagtttattaatacaatttgtgatagaatttgtacatgatgaacatgtcattccagatacttgaatggtggtagttattgtcattaccctgttgaaacagttcaaaagatggaaatggaaagaaataaaggtacataagcatgctctttatatattgaaaaataccgaaaattttattttctcactttctgttaggttggcgatatctccggactttaacggagtaacagttctttatctattatctatattctctatattagatctatacacactttatataacggttatctatctatctcttaacactggtatgtagcttattctccttaataatacacacagaaattaaacctagtatggatgcaccaaatgcaaatataaaagtataccaaacacttatattataagattcaatcattaaattaactgcccatttaggtgcattatttgatctaatatattttgcatcatgcattgcattatcaataattttattcaaaactttttcagaaacatcatcaggtttatttgatgttaatttattaattaaataatatgataaattattagtgaaaatatatgatgaaaatgaagtacctaaagttgaacccatacttctaaaagcatattgaattgaagtaactgatgtttgatgttcaattggaactgctgcaattaatgcaagtaatgtaactgttaacattgatgcatatgcatttatagataatacatttaatgtaaattgttcaaaaattgaaggataagtaccaggtcttgttctaattatcatcaatatcaaacctaaacaaccaattgaattaattataattgaaaatttaagatatttaccactccatttcatataataaccacttaaaattgatgataatgatgcaactataatattaggaattaatctaataccaacaccatctgatttaatacctaaaacagttgaaagataaactgggaaataatacattataatatatgaatacattgtaccaaaccaatttgctaatgaagcacctaaaactgatctatttttcattaattcaacaggtataattgcaaatggatgtgaattttcaactttatataatgaataaataccaatcaataaatgtaatgacaaaataaaataaacaaatttatcttcaaaatttgcacttgccataataataagtataagtaaattaaatgcaataaggaaaatacctttaatatcgactttctttaatttttcactcattgtagtaccactattagcattttcaatttcatgtggtaatggaggtaaattaaatgaaaatacaatcattaaaaagcaaattataccaattggaacttgacaccaaaaagccattctccacccccaatgttgtgaaatccaaccaccacaagtaccaccaactgctgaacctaaagcaaaaaaaatattacctaaaccttgataaacacctctatctcttaatgggattaaatcacttgaaataatagtacttaaagtaaacaaaccagctgcaaacccacttaaaaatctaccacaagtgaaagaaataacattttgagctaaagcacattgtaaacaaccaaaagtgaaaactgcaatacaaattaataataatggtttcctaccgaaaatatcacttaatttacccaatggttgaataattgaagttgagaaaagataagcagttgcaatccaagaaacgtaaggtattgcattaagatcagatgcaatatctgtcattaatgttgataaaattgttgaatctaatgaagctaagaaaactaataaataaacaggtattaaaattgctactgtttgattatatggcaataagtaaccatcattctcagtgttatcattatcaatttcattatcattattttcgactgttccataatcttcaataatttcttcagctatgtaaccaggtaatgaagttgaggtatcatccataacatcagccagatggctcttagtaggcaccaaaggttgagtggacatcttgttgttagaaattgaaagaaaagaaaagaaatattgtaagaaactgtggaactttaaaactttatatagtgactaaaattttatgattgtcgggattacccaattaggaagtaatagttacgtaatatgttacattctatctatctatctatctaaagcattatacactgttctcaggaactggagttgaaataacactgtttgaaacacttattgaattagagttagaattagcattagcattagcgttagcgttgagtaaatgtaatcgtctctcttccttacgtttacgtttcttttcagcttcctttgcctttctattactttcttcatctaaatgcattgcaatggtaaagtcatcactccaatggttgtctattttaattgagtatttgaaaatattttcataccatttgtttaatttagcagttgttgcggtttgaaattctggtttgtttaagataatgtaaataatattaattaatcctgtacttttcaagattgaaattgataaatcagctgttattaatggtgtaattaattcatcaattgatttattaagttttttataattaactggaggttcttctactaattcttctttagtttcttccttaacttcctccttaacttcttcctttactttttctttaacttcctccttaacttcttctttctcttctttaacttctccttttgattgttttcttaaaggaaatataagtgattgtaattccattcttaaatcataacaccaattagtcatttcctcaacttcagcacttaaggcagaagaaataggaattgtattaaaatcaaatttgaaatcctcaggttgtcttaatttaagttcatcaactactggttcttcctcgacatcttcttcctcttcctcatcttcctcttcttcttcctcttcttcttctatttcaggactttcctctgatccttcatactcatcatcatcatcatcatcctcaaaaacctccatctcttcctcatcttcttcctcttcctcaactttcttaggctttctacctggtctaccacgtttcttctccttttcaacaacttctttctttggtctaccaggtttcctaccctttactttcttctgtttcttaacaccatattctacatcatcagcatcatcaagagatcttttatcggattcaatttcttcttcaggttctggtgttataggtttaccccaactaccccattgtaaaaattcatcaattggtacttcaagtacttttaaataagcttcagttattctcctttttctaccaccacgtttagtctcatgaacaacttctccaccttcagtactttcaataccatcaacattttcaccaacactaattaaatagtctttaacaacttgttcagttaatggtttaatattcccctttttagtaaatgaatattgatcatcataataaaatttaacacaaatttgatcaccttgaggataattttctaaaaattttttattctttgaacttgattttaaattatttggtatattatccaaaggtacaataattgatggccagtctgggaatccctttatttttgataatactaattgttttggtgttaaagttgtcatttgttttaataaaagaatacagtgtttaaattggacaatattaagaaatttgaataatgttttttgtacactgcgcgtagtgttgtattatgacattgctgttgttgcctttatgacaatataatgtaattaatgttgtatatgtcagtatgcagtggtgatatgatattttaagtgtgtatatagttcaattaggtgtatcaaagtattttgggaaaatatgaagcttatatggtaagaattgagtaagataaagagaaaagtactgaattgacgagccacctaaaaagataaaattaacaaaataaaagaataactaaaatgatttataattactgctttgacaaaaagctataaaatacttacgaacatagaattaattatttttcatggaatttaagccaataaacttgatcaatcaaagtcttttcgacagcatatttagttagtggatcattcatatcactgctaacagcataaccatgagttgtatttgaatataaatctaattgataatgaattttatttttctttaaaatttcctctgatttatatctcaattcttttgtgaatatatcttcagtttcagcacaagaaataagtaaaggtttattaattgccattaattcatcatcagagacaaatgaaggatgagcgaatacaccaacatcaatcaaaggatttgtagaggtgagataatgtgaaaggtattttgcaccaaaacaataaccaatacctgataaaaattcagtatttggatgatcaattttaaattgattaaagaaatctgcacaaattttagttgttaattcaggtggatgatttgttaaccaagcattaaaatcatcaccagggacataaacatcattgttaagtatatccataataatgacaggataatccaatttatctgcaaaggtatcagcaattagtttaatgttgactaactctaaaccaaacacattagtgaatatgaaaaggaatttctttgaatcaggagtataatttgaagttacataacaagttaagtttgaaattgttttaattaaaccagttggagtaccggtgtgaataactttcttaccacagcaatgttgttgaggaggatttgatgacattatatgataaagaatagagtatgctaatagcagttgtaaagtctggtctcggatttatttgatttttcctaatttccaggctgcgcaatatatctgggggttgatctttaaatgtctgataagtttttcaactgaaagaaaagagaataaaataagagatggatatattattataattcatttatgataagaaacaaaaatttatattatttaaaggtattataacaatttttacaactaaacaatgttcaattgattagtttggctttggttttgagttgagtactatataccttaagtttatttaaacgactatctgaacctatattattaattttcaatctaaacaagaaataaagttgattaataggataatagttcttgatattacgtaaaccctttgtttacaattattaaattctgcttttgtgattcactctataacgtacttccatcccgtttttttacaccgctaagaaaatggtccgaatccccgaatttaatttttttccgttttctgaaaatctgcatgcgcaactaacaaatttttacttttgcatacaatgtgatttccaagtcgcattttgcactttctacatcattatttagattaatttaaaaaggcataaaatattaatgaaatataaaagaactataagaaaactaataaaagatttaattatttttcatgaaatttaaaccaataaacttgatcaattaaagctttttcagcagcatatttaactaatggatcatttaaatcacctctaacagcgaaaccatgatttgtatttgaatataaatctaattgataatgaattttatttttctttaaaatttcctctgatttaaatcttaaatcctttgagaaaatatcatcattttcagcacatgagataattaaaggtttattaattgcttctaattcttcatctgagacaaatgaaggatgagcgaaagcaccaacatcaattaaaggatttgaagatgtgagataatgtgaaaggtattttgcaccaaaacaataaccaataccagaaaggaaagttgtatttggatgatcaattttaaattgattaaagaaatctgcacaaattttagttgttaattcaggtggatgatttgcaaaccaagcattaaaatcagtacctggaatataaacatctttattattaagtatatccataataataacaggataatctaattttgatgcaaaagtatcagcaactaattgagtattaacaagttctataccataaatatcactaaatataaagaggaatttctttgaatcaggagtataatttgaagttacataacaagttaagtttgaaattgttttaattgaaccagttggagtaccagtatggattactttattagcacaacaatgttcttgaggaggatttgaagacattgtttgagtaaatgattaaatataagtatttaaaataatatataaaggtgtattactaagaaatgtactttccaataggagataagctaacccgaggaaatagaaatatccgcagtgtttacataataataataacaaagaaatacgctgattgtccaataggaaatttcgcgggtattttcaattatatgctgttagtattagtattagtattattaatattaatattataagtaatacagtgtatgctgttttccatttattacttactttcatctctcttctctctttctctctttctctttcgaattctcttatgctttcccttcttttaacaacacaaataatttattaataacaatgttaccagctggtgttatcgttgtcttctgtttactctttgttatcggttgtaccgttttcgctcttatgatgattaagaagtttaaacattaaagttaggtttaagttttgttttttagctattatttactctctctatctaattaattaattaatcactcgtttttttatataatataatataatatatttaataatcataatacttaataatacttaagaatactctactaaattcaattgtccaataatattccattataaggacattcgcactttctctaaatttacaaatttcctttttattttccactataatgacttcattaaactattataaactaattaatctctgctttctcccaaataggcattcctccttcctatctgagtattatctatcttctttttattatattataatctcatttgaatatattaataataaacaatcaaaaaagtatgtaatatcttaataccctcctaataccctcttataattacaatactaacatatctctttatagtgtctgaattaataaacaatcaacaacaacaacaacaacctttaaatgatcaaaataataataataatattatagaaaataattcaaataatgaaaatactccaattgtcaataccaataccaatactaacactaatgaagaagaaatggatgatgatgatgatgaatcaaaatcaaatgttaaaagagaacgtcgtaaaattgaaattaaatttattcaagataaatcaagaagacatattactttctcaaaacgtaaagctggtataatgaaaaaagcttatgaattaagtgtacttactggtactcaagttttattattagttgttagtgaaactggtttagtttatacttttacaactccaaaattacaacctttagttacaaaagctgaaggtaaaaatttaattcaagcttgtcttaatgcaagtgatgaacaatcaaatgatgaagatgaaattcaaaatgatcaacaacaacaatctgctccacccgttgcttctgctgttcctacacaacctacacaacccactcaatcacaagattataataatcaacaaaattatccaaataataattatttaccaaatgatcaacaaaatttctcttacggtgattcaactggttatcaataaataattcttataatctaatctaatttaattactctaatacttcttttttatacattttttaaaaactttttaatcattttttgtaattttaattctccattaacatccataccatcctctctcatttctttatttcttttcaaaatatcattgaaaaattcactattaataccacctttctttaattcttgatttgcccaatatgttgtagtatcttttgtaaattcaggatgtccttgaaatgttaatatcttatcctttatataaataccttgaatattacatttatcacttttaccaaaaaatatttcgtcatcattatccttaactctatctctatgaatttgactaataataaatgaatcaatacctaacacaggagtttccatttcaactttaacattaccaatttcccatgattcacttctaataatttcataacctaaactacgtgcaattatttgatgtccataacaaatacctaataatttacaatccgttttaataatagattttatataatctattaacccattattaaatttattatcttcaaatgcatcatattttgatcctgtaaaatatacaatatcatatggtattgtaggtaatttaccattatttacataattataaatatcaattttaaaattattattattattatcaatagaatttaataaaatttcccccatttctgcataatttaaattatcacttacaggtactctatcatcatccaattgaataattgcaacattcaatattttactaacagtcatggttatgggaatcagtggaaatcaaatccgatatcaaatatcactttataatgactattaaacatgaaataattaatggaaaatggtatgactcgcataggtgctttttatttataaatacccactctcttatctaatttttacaattttacaatttttcagatataactttttccatttggcaaagatgaatttagatttacaaaaagacacatacactgaacaacaaacacctgatgagaaactagttttcgctccagatacttatcaatatacactttatcaattaaatgaacaagatcttgaaaatgatccaattaaacaatttaataaatggtttcaagaagcaataaacagtggagaagatattccagagagtgttgttttaagtacttgttcattaccaagtggacgtattagttcacgtgttgtattattaaaggaattagatcaaaaaggatttttaattttcagtaattgggatacaagtaagaaagaaaaagattatcaaactaataaatttgcaagtttaacatttttatggaaaaaacttcaaagacaagttagaattgaaggtataattgaaaaattatcatatcaagagagtgaagaatattttaatgttagaccaagaggtagtaaaattggtgcttggtcaagtcctcaaagtagtataattaaatcaagagatgaattagataaaattgttgaagagaaagaacaagaatttaaagatttaaaagatgatgaaattaaatgtccaccaaaatggggtggtattagaattaaaccattagaaattgaattttggcaaggtagatcaagtagattacatgatagattaacttatcgtagagatgatattgatgacaataattgggaaatttttagattagctccgtaagttatataaaattacttaattaattaaatttattaacaacttttgaaaattcagaaccttgagttttagcaatttttaattctaattcacttggttttcttgaaccatcaggacctgcaagtgtacctgccccccatgcagaaccaccatgaatttcatttaaattagttaattcaccgaaaactcgtgcataacctaatggaacataaatcataccttgatgagcaattgttgacataaaattaacaattgtcatttcattaccaccacctgtactagttgaaatgaaaacaccacaaggtttttgatataatgaaccattttgccataaaccacctaatgaatcaataaatgccttaatttgagctgggaatgaaccaaatctagttgggaaaccaaaaataacaccatctgcagatgttaaaatatttggagttgctaatggataatctggttttgcaggtgcatgcatttttaataaaacttcttcaggtaaagtttctgcaacttgataaattgttgcagtattacctgattcttcaatacctgccttaacagattctgcaagagttacaatgtgatgatacattgagtagatgataattgcgatattagccattgtttagttgttgtttagttgttgtttagttgtttgttgttataagaaaagtgtataataaatgaaaacagaaaaaaaaatgtggcaaaagtgtcctttatttataataacgtggaagataaacttgcttattaacgtttcttagtaagcgagtatttcattattaagtattattaattattattatcaatgattatcaatgattattaactggatgtttatattattatcaatgattattaagtaaatgatgattattaagtattaagtattaagtattaagtattaagtattaagtgtattataaatgtttctatctaattatacattctaatttaattgaaaatctttgaaaagaatctcttaattgcattgttcttctttggtgctggttctgcaactgtcttcttggtttctttcttaactggttcagccttcttagtttctttcttaactggttcagcctttttaacttcttcctttttattcatttttgaaacaatttcagcaaattgtttaccttgaatattagcaatttttaaatcattttcagttggttgtcttgaaccatcagaacctgcaattgtacctgccccccatggtgttgaaccttgaatatttgataaatctgtaatttcaccgaaaactgctgcataacctaatggtatataaagcataccatgatgagttaaagttgataataaactgaaaactgtagtttctctaccaccacctgaaccggtggaaataaatgcacttgcaggtttttgatataatttaccttcaccccataaaccaccagttgaatcaataaatgatttcatttgagctggcattgaaccaaatctagttgggaatccgaaaataataccatctgcttgaactaaagtttctgttgttgcaattggataatctggctttgctggtgcatataatttagtaagtacttcctctgataaagtttcaggaacttgataaattgttgcattattaccagatgattcaacacctgatttaacagattctgccatttgagcaacatgatgataagttgagtaaataacgattgcaatattagccattgtagttattaaaggaagaatgaacgagaaagaagaagaataaagaatgaaattagaagtaagaaacttaagttatttatctgaaaaggaacaattactaagattataaataaaataagatggctgtgcattaaataaggaaactcttgcttttaatcttttcacctctttgtaagcataattctcttattattattcaatctcttcactttacagtatttcaatgcaaatttatcaattttaatatttctaacattgatatcattgataaatggttcaatttcttcaattaaccaattacttttcaattggaaaagtttatcaaatctttcattaggagttttcaaattcttcagtgtttcaatattaatgtaattaactgtattggaattagttatatatccaatacctgtaattatatctttaatatcaaattttgtattataattaattggtaaattcatacgtaattcaataagtaaatcatcaattgaaatttttttaattttttccaatatagtagatattataaatttaattattttattatcgtttaatatatattttttgtcttcaatattataattaataaattgatcaatacatggagtttccgtagtgatatcatctgttatatttgtataattaattattaaaaatgtaattattctaataattaaatgatttttaatattatatttttgtaaaattttattataaatattaagtatcgtacccttaatatcaattgaattaaaatttaatataatttcattaattaattgaattttcaaattttgtgaaattttaacaattttatcaaatgatggataaacattatcattaattattaaattatcaaattccacaacagaaattggtgtttgattaaatattttaataaatgatatcattacttcattaagagattcaattgtaatacaattaaatttatcatcttttatatcatttaaatcatttatttcccaaatatttatatttgaataatttataatattattatgaaaattttcaataattaaataattttcaaaatttttaaaattaataaaatcatgtaataacatttgacaatttgaatgattttgttgcctaattttaaatgttttattagtagttgttaaaaaaggtgttgaattaaatgatgatgattttaattgaaatttatttgaatttataccatattttaataatattttttcatttgttgtagatgaagattttaattcatttataaaagattttggtaattgaattaatttataattagttgatgtattagaaggtagattatttgttggattaagtattgaaaacacgtcagtcatttgtcaaaagaaaagagtgtatagtgaaaagtgattaattacgcgtcagtatttttcaattatctttgaattgtatctcttttaataaagatcaaaatggaaaaactgataacgaataaaactccagcaattgttaacgtacaattttataagttatgtaaagttaataaagttgataaaggtaataattttatatctgagataaaaccaatatttattactattttatcagaattgttaaaaccattaaaggaagatgatgaaaatagatttaataattttttaaaaagattaattgaatattatttttcagaatatgattctactcatttatatgaaatggatcaaattaaatatatttcattttttaaaactattattagaggtccaaatgtatcagagaagagaataataaagaatcattatggacattataaaacaaatagaaattatttacaacaaacattcaattattttcaaaagaagtataattattcatcaggtaaagatgcattaacatttccaaatcaattaaatttcccaaaatttggtaaattaccaatgtcagtaaagaggaaaatgacattaaaggatgttaaaaaattaacacaggttgaaaagaaaggtaaaataggtagtatggaattaattcttaaactttcattaattatacataaatgtactcaattatatgaaactaatttattattaagttcatttaaagatcaacaacttaaggatattcaaaattattttaaaaataataatatttatgataatgaaattgaattagagataaattctagaaatgaaaaaaagaaggaagcaaaaaacaagaaataaacgttgaataggaataggaatacctaatcaatttatcagagttaataatacatcttaaatatttcttttcttgatttttcatataaattatataaattatataaattatataaattatataatttacttaataatataatataatataatataaatctaatttttaatttttatttaagcttttcttgattttggtttagttgcattatttgaacttgtagttttagcagttgaaacaacaggatcaatgatttctttctttgatttctttcccttctttaaataaacagaaatgtagaaagaaatgaataagaataaataagaagtaattataacataaccatagaaagccgcttgttgagtaccataacaatcacctaaatgaggtaaaataccatcaaaataaacatttgcataataagtataagtacaagtataaataaatgcaatatcaattaaaaattgtaaaatttgaaatcttgtaacccattgtttccaccaaactttaataccacaacttgaaaggaaataataaaaatacattaaaacatgaacagctaaattaagtgaaataacgacccattcaacagaagtatgaccaataatttgagtataacaaagaagtgcagttgcaccatgatgataagtatgtaagaataataatttttttcttcttaagacaaggaaaactgtatcaaataattcaataaatttagttaaataatttaaataataaagacaaaccaatcttttagtgaaagcttcagatgaacaaactgaatgtaataaaccattataataccaaattgggaaaacttgttcaatcattaataataataaaattagagaaactgaagttaagaataaattatgtaattggaaaaggaaatttaatttaattggatttgaatttaatttatttaaaatgaattgaccaccgaaaataatgaaataataagcaattataattgaaattgcatgagggaaattagcaaggaaagttttataaggtataaaagtaaattcatcagctgaataattattattagtgaaataagtgaaaaaatgattaaaaattggccataaatgaataccgaaagggtaatcaggagaaggttttgaccaaataatataatcaggtaatgaataagtcattatttaataaaaggaaggaagatagatagaatagaggaataaaagaataaaagtaaacattgtaaaatgttagtaatggttgttgttgacatgtgttgaaaaatttaaaattatgtgtgaattaaataaataaataaataaataaatggttggttaaatgattcagagggtcgatgggactgtcggggtattagcaacaacaattacccgagtcacgtgacattgccaacagtcacgtgacctattatatcattacgtaataaagccgggtatagaaaacggctataaataaaaaaatttaaaatttgtaaaaaccactcggctgtagtataataataataataataataataataataactatcagggcagtttaatttaataacctctaattattaacatcccatctattcccgaggctataatcttattaccttatttaatattcttataatcttatatatcaccacattgcaatgatctttaataactaatactctcatatactactttctcttcttttaataatctttcctaatgtcaaataatatacccttatcaaatgcagttaatttaaattcttatcctattatacctaatatttcaaatgattcaaaacaattcctattacctcctttaactaataattttttatataatttatcaaataacgttaataatactaatactaatactaatatcaatatcaatatcaatccatcatcatcatcatcatcatctacatcttcattatcttctccaaatccatacattcatcaattaccacctttatttaaattaaatccaatacctcaaccattaattccatctattaataataatataactaaaactaataaaaaatctaaaaatttacctcgtaagaaaagggaatgtccaatatgtcataaattttattctaacattacaactcataaaacaattcatattaaagattcaaaaccttttatttgttccaactgttcaagaccttttaaaagattaaatgatttaattagacatgaaaaatgtcatttatctaaaattggtgattgggaatttaaatgtccttattatcaaaaagatattaataataaagaaataaattcttgtcatcatacaggttattttacaagatgtgatacttataaaaatcatttaaaggcaattcattttaaatatcctccaaatactctaaaatgtaatagaattaatgtttcaggtaattgtagagaatgtggtcaattctttattaatgttaatgattggttaaataatcatatagagaataatcaatgcgcttcaatgaaaaaatagttcttctttatattataaaccttcttctttatataccttctttttattttatttatttatttatagacataccaatgattaaatatattctgatactcatattcactttaattaattataaatatttccctctagtttatacatttagatttacttatattataattaaaaatctttattggaaaaaatttactaaaaataataaaattttaattgaatcaacaagatatactaattgttcattatttgaatgtgatttctttggttttcataaatctaattcaacttatttcacagaattagacctttgtagaactcaatgtgtacttaattcaactaattattttattaataaattatctaataatgaatcaattccatttataccattagcttcaattcataattcattccttaaagagattaaaccattacaaaattatcaaatgcatagtaaaattgtttccactagtgataaatgggtatatgttatgaccttattcaccataagtaatggtaataatagcaatagtaataacagttatacctacaacaatcgacgcatcgccgccatttcaataggtaaattaattttaaaggataaaattaataaatcaactatttcaccatcagttttacaattaaattcaaatttatcaaatgaatctgaactactctctgttattgattcaatacctgatttaattaatatttataaatctatataaattatctatatagtaatgacggaaggttataaaaatcctgcattagcaatgcttggtattaaatcaattaaattaccttcacgtaattggttaattttttggacagttttatcaggtttatcaggtggaattatttatgataaatggcaacaaagaattttaagaaatcaatatatggaaaaatttaataatcaaaatatttcttatcctgttgatcataaagttaggaaattaaaaattttcattgcaccaccaccaaatgattatcttgatgaaagtatgaaatattttagaagatttgtaaagccaattattaattcttcaggtttagattatgaattaattacaatggaaaggcaaggtgatataagatttaaagttgctgaagaaattagacaaattagaagaagtctcataaagaaggatttacctgaaccagaaatagtaccagtagtaacaaatgaaattacaccaattactactcaagaaactaaatcagttagagatttatataatccaatggatttattaggtattgaaaaaatttcggtaattttaaggataaaaaaataattaatgatgattcaattgttaatgatgttagaaattcaggtggtattatatgtattggtcgtggtgcatataaagaatatattaatggtattcatgaaggtttattaggtccattagataaaccagaagtagagaaaattgaaaaaattgaagaattagataaagataaagaaagtaatactaaagacacagaagattcagatgatgataaatatgcaccatcagcatttatatacgccaaggattattcaaatgcaacatttgcacctgaatttggtattgatttaaatgataatattgataatatacgtaataaattacgtgataataatggtacaccatattttttcactcaaccaatacttgaactacgtaattataatacatcaggttttacaaaacaatttgaaagaatgtggagattttataataagagaaatcaattaattgaatataatgaaaatttatcaaaattaattaattgtaattattgtaattttacaaatgataaattaaatcaaggtattgaagaagaaaatgattggccttcaagttggttgaaaactgctaaaattaataatagtgaatgggttagagaatttaaaggtgatgatagaattatgaaaattttatcaagttataactgtaaataaaataatctgtatataaaatataatataaaatacttaattactcagttaaagctctaataactgcaggacgacgcatcattctctttgtccatttataaacttcaggaaattcaccctttaaatcaataccaattttatcaacaacataattccatggcacaaaacataaatctgcaactgtacatctatcaccaactaaccaaacaggtgaatcaaaatatcttgattgacttaatggtgttaaccccattgaataactttcagcattttcactatctaattccattattaatgattctctacgttcacttaatgccatttctaatacaccataaactctacgaacttcatcagtatatctattaattgctgatggtaaattaattgaatggaaataacggaaatgtaatgcttgtccaatcattggtgcatgacctgaagtttgaaaaaataaccatgataaaatttgactttgttcaattaaattattactccaaatttcaatttcattattatctttattattagtaccactactattattaatttcatttaattcttgtaattttttattacataaataagttataattgaacctgattcccataatgatatttgattattattattattagtattgacattatcacttcgtattctaacatttgaattaatatttgccctatgatcaattaatgcaggtactctaccatttggatttaattgtaaaaattgtggtaatctatgatcatttttattaaaatctaaatgaattgtttgatatttataatttaattcacttaaaataattgcaattttaaaaccatttggtgcactcctatgagtaattaatgaaaatccatcatttggtggtggattattgaaaaataaatttaattctgaaatattatttaaatcattatttaatggttcaacagtttcttcatttaaatgaatattacgaagtccagaagataaatttgagacatgtgggtcactacgaaatgtatccattatagtatacttgctgtaccaaaagaaaataaaagaagataaaataaaagaaaagaaatacaataatataataaacaataaattgacacattcattcccccccatagtcatttgaaacgttgagaaaattcatgaaaaattgtttacattggaaatgtggctttctttcttttcttttaactgttgttttctttttgggtaacggatgttggtctctctaatacgttcgttattagatgcttatgcatctcgtaaacagatatctcatttggagacatctcttaatccaataccaacttggaaattaattataaatcctcaaacatggaaatcaactccaaatttaataattttccattatttatttgtttcatttataatattatttgcaatgacaattactccattaattttaccaattaaattatttatcattcttacattaatttatataacaacagctccattatttgcacaatttttccgtaatggattaccaattttagcttgggttttccttttctttaattcaaaatttataccattagaaatgaagagaccaataagtgttaaagttttacctgcattagaaacaattttttatggtgataatttaagtgaaattttagcttcaaagacaaatactttcttagatattataagttggttaccttatggtataattcatttttcattgccattcgttgttgctgctttaattttcatttttgctcctccaaatactttaccacaattttgttggtcatttggatttatgaatttaactggtgtagttattcaaaatttaatattctcttgtgctccaccttggtataaagttttacatggtttagataaggcaaattattcaatgaagggatctcccggtggtttaggtagaattgatattttattaggtttagatttatatacaacaggatttactaattcacctcttattttcggtgcaatgccttcattacattcaggttgttcaacaatggatgctctttggttatcttaccttttccccaaatttactccattattcatattttatgtttgttggttatggttttcaacaatgtatttaactcatcattattttattgatgttgtagttggttcatgtcttgcattattctttttttcattaattaaatggagaggtaaattaccaattaatgatttattttgtagatggaattatgaaaatattaaatttaatgatatttggttagaagatccattaaaacaattagattattttaattatgataatatgaatgatttagaaatcgacttagatacaaacaatgatttagaatctcaaatacctttaaatgatttatcaaatgataataataataataataataataataataagaataacgataatgataccgataataatgccgataatgaccataatgatgataaaaataaggataaaattgaaaatgataataattttattgaatttgaatcagacgatgaaattgctgaagctaatgatattgaaaaatcaatgcatacttcaataaagaaaactccaaaaatgtataaagaatcatttgaagcaacaatttcaaatccttcttcttcatcaaattcaaattcaaattcaagttcaactcgtccacctactttataacaatatcttgatctatatacagaaattaattaaatttagaaagtttcaaataaaatacaaatgtaaacattacttaactactcttacctctaccacgtcccctacctcttcctctacctctaccaccacctcttccacctctagttttaccattacctctacctctagtacttccattcccattacctctttccatttcctcttgaactcttttactctcttcttcccaccatctagcaaattcttcctctgctttaatatcttcaatagatttagtttcaataacttcattaataattactttttcaacactttttttacgtttcatttcatctaatgatgggaaatgaactccagttaattttttcggtgcaattattgttgcagtacttatctctaataaatcatttgagttaccttcaataacttttggtgttgtattaccccatgcattattaggtgtccaagttctcctattttccttctccaactctcgttcacgttccttttgttctttctccttttctttctcctctcgttctttttgtaatctttccttttgtgaaagtcttggagttagtttgattttgacagattttttactcgatgtggttggtataattaatgatggtgatggtgctgatgatggtattgaagctgaggatgctgtcattggatttggtatgattgatattggtgttgttggtggagttggtaatttattaataatcggtctagatgtcttaacactcgacctacgtcgttgaacaacaatgaattcattagaatcaccttcttcaattgcattttcattattattaatattattaactgtttcagattcaactttagttagtggtaatggtttagaaatttgagatttcctacgtgttgttaaactttcatgtttagaaattgtctctttagaaacaccttcaactgaccaaagatatggatgtaaataatattcattatatgagtcagtaaatatagttcccatattggacctctttttcaatttacgttttggtaaataaatataaattaattctttgattcttaaatcaattaatttcatacattcatcacttaaatttgaattatttattcttgaatctttataagtaattggtaaattattgaaaatataccaaacacaattagagaataattgtttagaacttgaaataaatgcatgttgtaatattatatcataattttcaaaattaatacaatctttaattgctaattcacataaatgttttaattctggaattaataattcattagataaatagattaagtcaatcatatcattaatgaaatcatcaactgtgtctttacctttgatgagttccttaacatttgaataaaaaatatcatcgttatattcaccttggaaatatttcattaataaattccatgtagtttctttaacatgactaaaatcaactatatcaatttccatccaattattactaaacaattgtttaaaataatcacatcttgcaattaataaaaatttccaagtctttatttcaacattattagctaatttaactgtaatatcacctccattaagtttgttcatacattcaaaaaatggaattttaggaaatgtatataataatctatcccatcctgttttgatagttggatctgtaataccattattccaaacatccaatatctcatcattgtataacatattaataaatattacaacactacgtatatccatttcaccaattataaacccatcattttcattaaattcaaaagttaaatttttacgatctaaatgaaatttttcacgttcaatatttaatctattaaataaaattgctttatgaacattaattgtagttttcatattagttgttgtattttcaatgtaaatttgataatcataacatttattaaataaacaattatttgataaataatcacataatgtttcttcaaaatggaagtaatcatacatcaatggattatgttgataagcaaatggtgttattcttttagtgaaaactaatccattctctatatcatcattatcatcaccttcatcatcactatcattatcatcataatcttcttcaatataatcttgctctaatctatttgataagaaattagtatcatattctaggccactattaatattttttccatcaagtggtgatagggaaccaatatctgaaatgattgaagaactagtaattttatgttttaaagaatcattttcctttcttaataagactattttatttttagaatcaccattagatataccaaatccaatagaaactgagtaaatattggaaacatcattaatcctaacccatttagtctttgtacgtttaaatgcttcaccacttttagtacataatactgcaccaattgcaccattaattaattcaccaattgagaaatcaattgcattcatttctcctcttgaaggtttccaaactgttgaaaatttcaagtgacttttaaagacatccttagagattgtatattttggaaatgtaaatagtaaaatttcaccagtatttaataataagaaaactgaataattaccattcatattacctgaatcttttgaattattaattgatggtttaattattttaattattttacgtggtgaacttaatattcttggtttaaaagtattccaattattactaatatcagtatttgaaggtaatgaaattttcaaatgttggcctgaaatataaatatgaattaaatttgaatttgtaacaattaaagttgcaatatctaatgctaaaacaaattttattacatcatcaggatatttccatgtaaaatgtgcacttattgatttggatgaattatcagaggtatgtattgcattagttaatggaccaaattgtcctaaatttaaaccatagatatgaagtgaatgtggagaatatacaactgtatgattatctgatgatgaaacacctataatttgagaagtattagatttagttgaatcatcaatggataatctagtatttgatcttgaagataatgataaagcactaaagttattagtaatcatattcgatgatgtcagtgaggaggcagatgatggagttgtaacagtattggaaatagatgatgattgtttaataattatttgaattggtgttaatgaattcaaatcttttgaatgaggtgaagaaattgttgttgaggatacattttgatataaattaagtctttgaatattaataccaaatgcataagctttattaaatgatgtaattataactgtatgaccattattaattgatgcatctataactttttcacctcttaaaaataaatcatcaaagaatttaattcttgagaaaagtgcagtttttttaataatatgtaatgggttagttatgtataattgacctgatgatgtgattatgatagaatgtgatgatgttgaaataaattttgaaattttgaaatttagtaatggatttttggaaggtaatggtgataataaattttgataaattggtatgttaataaaatcgccacttgattgtgatacaattaatgaagatgtgtggttataattattattatgataatgattattattatgatgactatcattatcaagtttttgaaattcaccattactatcaatggaatcaaccgagttatcaaatgaggttaaatatgagaataataaatcataaggaatttgcttattcttgtctttatgattcagtagtttagtttgtaatggagtattgaatttaagtaataaattaacaaatgtaaaattaaaataataaatagcataatgtaaaacattccaatgattttctatatcatcaataagcaaacaattatgtaaatcttgattattatttaaatattttaaaattctctttaaattataaatatcattattaattgctaaaatatgaagtaatgatctaccgaaaatatctctcttaaatagagtttcagatgaaataattattgaattatcaattgtgttattaatttgttgtgtattattcttagtaaaaccaaaagtatccccccttttggtcttattctttgatctattattgggtattgcggtagtgaattttaaaacatcattgggacggttttccgagctgttaatatgagtaatcgaatgaataatgtgggttattagaaaggtttgttattagactatgtggggatagtgtctaatttgcagaaagaggtgttaatacttaagaattaggacaattactaaagaagaaagtacataaaagtagttaattttgaaattatgaatgaaaatgcacgttgagaagaaagtgaaaatatttgaattttcatgctttcaataaatctattataataggactttatttcattatttattggacaagagagatgtcttttttcatagataacaatagtgtagcaccacagggtgtgtcaagtcaacgtatggaacttgcagagtttcaatttgatgcattaaatggattattagcaactattcgacgtagttgtggaggtaaatgtattccattagattatggagagaatgatcttacaaagggtgaaagtgaatgtactaatagatgtgttgctaaatttatgcaagcacatcaaactgttgctattcatgttgaaagaaatcatccaataactgataaagatctaattcattatgaacatattaagaaagagtatctcaatggtagtgaagatacttcaactaaatcttcctcttaattataattatattggttaaatcttgtaaatatatagcttatgtattactttatacgtataatacacattaatacacttagtgaatatgatttatgtgtccaataaggtcttacaacgcgttaaatggatgtgtttgtaactacttagtataagacatgcatacaattaatggatgaaaatatttattacaactgtttgtttatttgaaggctgttttttttcttttatctgttggttccttgtatattaaacactgcatacatacatcatagatgaccatggatcaatcagtcaatgactcagtcagtgaatcggttaatgaaccagtcgatgaattagtaaaggaaccagttgaggaactagctacagaatcaaatcacgctttaattcatttacctgatagtgcaacaattaataacaatgaatcacatgaacatagattgaaaagattccttttagatagtgatccattaactgaatataaaaaacatggatctgatgatgctgctaaacgtttccaatatttactttcattatcaccattatttcgtcattttattgatattaaatcaacaaatgataaatcattacataaattaattagacaaattgatcaaaaaaatgctacaagtaataaattatcattatctacctcttcatcacgtcgtaagaggaaatctgagaaggaagaggatgcagaacttttaaataatgaagaagaagaaattaatgaatcaactacaagtttcttaaatgaaagtcctaattatattgatggtaaattacgtgattatcaagttcaaggattaaattggcttatctctctttataagaatagattatcaggtattttagcagatgaaatgggattgggtaaaacattacaaacaatttcatttcttggttatttacgttattatgaaaaaattgatggtccattcttagttattgtaccaaaatcaacattagataattggcgtagagaatttgctaaatggacaaaagatgttaatgttgtagttttacaaggtgataaagatgaacgtaataatataattaataatatattattaaaggcaaattttgatgtttgtattacaagttttgaaatgattattagagaaaaatcaagattatctaaatttcgttggcaatatatggtaattgatgaagctcatagaattaaaaatgaacaatcatctctctcacaaatcattagattattttattcaaagaatagacttttaattactggtacccctttacaaaataatttacatgaattatgggcattattaaattttcttttacctgatgttttcggtgataatgaaattttcaatgaatggtttgaaagagagaataaaggtaatgatgaagaaaatggaaatggaaatgaaaatgatgataagggtaaagaagcagttgataaattaagaaagattttatcaccatttctattaagaagaattaagagtgatgttgagaaaagtttattacctaaaattgaaacaaatgtttatattggtatgactgcaatgcaattaaaatggtatagaaatttattacaaaaggatattgaagcagttaatggacaagttggtaaaagagaaggtaaaacaagattattaaatattgtaatgcaattaagaaaatgttgtaatcatccatatttatttgatggggctgaacctggtccaccatatactaatgatgaacatttagttttcaattctgcaaagatgattgtacttgataaattattaaagaaattgaaaaaagaaggttcaagagttttaattttttcacaaatgagtagattattagatattttagaagattattgttatttacgtgattatgaatattgtagaattgatggatcaactaatcatgaggaaagaattagtgcaattgatgattataataaggaaggtagtgataaatttttatttttattaacaactagagctggtggtttaggtattaatttaacaactgctgatgttgttattttatttgattcagattggaatccacaagctgatttacaagcaatggatagagcacatagaattggacaaaagaaacaagttaaagtttatagatttataacagagaatgcaattgaggaaaaagttttagagagagcagcacaaaaattaagattagatcaattagttattcaacaaggtagaaatgatgaaaagaaagaaaatcaatcaaataataaggatgatttattaaatatgattcaacatggtgcacaaaaagttttagatactgatggtgaaggatcaaaagatttaaatgatgatattgatgaaattttaagaaggggtgaagaaaagacaaaggaattaaaggaaaaatttgaaaaattaggattagatgatattcaaaattttaatggagaacagcaatcaacatatgaatggaatggtgaaaattttgcaaagaagaaatctaaaggtttaggaattttccttaatccatctaaacgtataagaaaagaacaacaatatagtgttgatgaatattataaggatgttatgaatcaaatgaaggttcaaccaaatgttaaaaatgttatacctagaccaccaaagcaatttcaattagttgatttccaatttttcaatcctaaattaaatgagatatttgaaaatgaaatgttatcatataggaaaagaattaattataaattaggtgaagaagatttagatttagagaataaaaaatatgataattttgattatgaagaatatttgaaattaagtaagaaagaacagaaaaatattttaaaggaattaattaatcaagaacaagaaaagatttacaatagtaaagaattaagtgaagatgatattaaattaaaggatgaattaattgctgaaggttttggagattggaatagaagagaatttatgcaatttattcatggatgtgccaaatatggatcaaagaattatgcagagataagtaatgatgttaagggtaagaatgaggaagatgtacgtaaatatagtgaagtattttggcaaaaatataaggaaattgaaggatgggagagatatttaaaagaaattgaatttggagaacgtaaacttgaaagaattaagatgcaaagtgagatattaaagagtaaaattaatgaagttgaaaatcctattgaagaattaaatataatgtatccaccgaataattcaaagagaatgtattcaattattgaagatagatatttattaattaaggcagatgaatatggattattaaatccatatgtatatgatttaattaagagagatataataaatgaggaaatgtttagatattgtttttatttcaaatcacgtacagctaatgaaatatcaagaagaatagttacattattacttgcagtttcaagagaagttgaaggacctgatgcatttaaaagaaagaggaaaaatggtattaataaaaataatgaaaatgatagtgataatatgagtcgaccagatagtattgatcctgagagtggagaagcgaatgaaaatatgaatggagatgtaaagaggaggaaaattgaggacattagtgtataatacagtttgtaatacagtttatatatgtaagaaatagatctaaatacagaatataatagaaatagataagataagataagataagataaaatggatagacgcgacggtgctgacataatcataaaacaacaccgacgtatcgaccccaaagtagaaaatagaaaataaaaatttgcttatttttgctctctctttatttgttgagaaaatgcaatgctttcaaagaggggaaatactgacattgacgaatagagcgttttcaatttaattttacatgattttatgtgatttatagtatttatagatttcaatttgcctttcattttacacatcaactgcttgctttagcctgcttagattcatttggtttttcgtatattcggtactctttctcattgatcaaaccgttttttcgtagttttcatttaatacttagaatttaaattattaaaaataaaaatacaaaagaatatactacaattaggatataatatataatctatagaaaatcaattgaatatactatataaatataaataatagatattattgcagattaaaacaaacaaaaatactatataataaacaatgttaagatcatttaataaattatcaataactaaatcagttgtaagacaagcaactagaaatttctctaaatgtcaaattattaaagatgaagtctcacttaaaattgatggtattccagtttcaattgaaaaaggttcatcaattattcaagctgctgaaaaggcaggtgtctatattccaagatattgttatcatgatagattatcagttgcaggtaattgtagaatgtgtttagttgaaattgaaaaatctccaaaaatggcagctgcttgttcaatgcctgttggtccaaatatgtcagttattactcaatctgataaagttaaaaaagttagagaaggtataactgaatttttactttcaaatcatcctttagattgtcctgtttgtgatcaaggtggtgaatgtgatttacaagaacaaactttaaaatatggttctgatcgtggtagatttaatgaagttacaggtaaaagagctgttgaaaataaagcaattggtcctttagttaaaacttcaatgaatagatgtattcattgtacaagatgtgttagattcttaaatgatgttgcaggtgctcctgaatttggtactgcaggtagaggtaatgatttacaaattggtacttatgttgaaagaaatattaattctgaattatctggtaatattgttgatttatgtccagttggtgctttaacttcaaaaccttatgcatttaaggcaagaccttgggaattaaagagaactgaatcaattgatgttatggatgctttaggttcagcaattagaattgatgcaagaggtatggaagttatgagaattttaccaagattaaatgaagaaattaatcaagaatggatttcagatagatcaagatattcttgtgatgctttaaaagttcaaagattaactaaacctttaattaaacaaggtaataaatttattgatgctacatgggatagtgcattaactaaaattactgaatcaattaaaaaaattaatccatctaaaaatgaaattaaagcaattgcaggtcctttagtcgatgttgaaggtatggttgcattaaaggatttagttaatagattagattctgaaaatttaacaattgatgcaccaattaatgaaattccttcaattgatattagatcaaattatattttcaattcaactattgatggtattgaagaagctgatcaaattttaattattggttcaaatccaagacatgaagctgcagttctaaattcaagaattagaggtagatggttagaaagtgatgatgttgaaattcatcatattggtgaatcatttgattcaacttttgaaattaattcattaggtaaaaatgcaaatgatttagaaaaagcattaaatggtaaattaggtgaaaaattatcaaatgcaaagaaacctttaataattgttggttcaggtgtttatgaaaataatgattcaattgcaattgattcaattttaaagaaatttattaatggtaaagaaaatattattaattcagaatggaatggattaaactatttacaacgtcaagcttcaagagctggtgcttttgatattggtttctataattcagatccaaaaattcaatcaattgaaccaaaagttgttttcttatttggtgcagatgaaattgaaccaaaatcaattccaaaagattcatttgttgtctatgttggtcatcatggtgatattggtgcttcattagctgatgttgtattacctggtactgcatatactgaaaaatcagcaatttatgttaatactgaaggtagatcacaaatgacaactgctgcaactggtccagttggtgcatcaagggatgattggacaattttcaaagcactttctgaatatttaggtgttggtttaccatatgaagatattagatcattacgttcaagaattgaaacaattgctccacatcttgtaaggattgaatcagttgaatcagtttcaccagaaattgttaaactttcaattaattcaagcaaaagatattaaaccaactggttccgatttagttaatccaattaagaatttctattttactgatgttatttcaagaaattcaaagacaatggctcaatgtgttggttcatttggcccaactatcgaaaaggttaatgatgaaaatgctcatcaatatttaggtttggcttaaattgaataatacaatttaattttaacttattaatatttataaacctgtgcttttagtttttcctccttattcatatacattattattatattaaaatatttattttcttgtttaacgattaaaatttcattcccccctctcttaacatatcttaatagttaacaacaattagttaaattttttatattgattatttattattcacttctattaaaattttataaaaattatttatactataaactagattataaactattttattttatatctaaatcattaaatattgcatcggagccatgatcatgaatacaatttaaaagccatcttgaaactttattaacacctttctttttacttgcctcaatacaacttgcaatggttatattattaacttttaatgttgttctaaaaactggtaatatacttttagttgtagtatcttgttcaactgtgaattgtggtataacatgtctacttaccaaatagttgaattaattcatttttagaattactacttatattattgagttcatcacttggaatagaatatggtacttttaaatatttaaaagttttaggtgtttccttaatcctcggtggtttgtttaacttcttctattttttcagtagtattattgtccttattaatatctttattatctataactattcttattgtctattgattcaaattttttactaacgacagattctgttcttggtgtcatcattctaattaaatgatacttttcaattaattttttatttaataatgaagcttgtgcagctctagcacttgcatcttttaaatttctaccttcaccataacctaaaatttctccacctatactacattcaacaactgttggagtttctggggtaatttgcttttgaatacatttatattcaggatgtaatttagctgatccaattaatgcatataattcaggttttgctaatttattaacttcatctgatgacgttaatcttatcgggaatttggtattttctggtagtgtattattaggtggcggagttggtaatgatggtattttaggtaattgaactgatgggattgcaattttactagctgtggatgatgatgtggatgatgatgtagatgatgatgtagatgatgatgatgatatttttgtgttatttttcaaaatttagcaatcaagtttttacttaaatgactataagttaatttatctgattgttcaaattcatcaagaattggtttataaacatccattaaccaagatttgatgaaattatatgcgtctccatttctacctttatcgatgaaaattgcaccaatatatgcttcaaataaatctgcaattcttttattgttcttaaattttgaatttatatccagttcagttttaattaaatgagactttaataattcttgttgccattcaggaaacttataagctcttgaaatgatttcaattgtttcatttttaactaatgtagatcttaataacgttaattgaccttcatcaaatgaaggatatttcgattcaattatatcagatactatagtttctaaaactgcatcacctaaaaattccaatctttcattatttgattgaacttgatctaatttggatgaatgtaaatttgaatttgttgcagatttatgaatgaaaacttttgattccaaaattgaatcataaataacgggtaatttaggtaatatagaatgatagtttatatcatcttcttccttttgggaattatactgttcttgccttttctctttaattaataactgaacatcatcaacggaatctaatactgtattatcattaaaattgattatttgattaaatattggtaacttattatcatcatataatgatttaatttgacttgcaagttgaattttatgagattttgctaaaagtaaaacttttgctgcaacttcaccattttgtgaagaatctttatcgagagattgttgtactaaactgtttatgtaatttttcaattctgttgcatttggtgatgtctctattaattttttcaaattttcttgaataagtgaaatagaatgttcaatggatatcagatcatgaattgcaaaattacggaagtttgttgattgttctggttctactgtggtgtcttccttcttatcttctttcttcttctctttcttatcctttctatcctttttatctttcttgtctttcttcttttccttcttctcctttctctcagatttgtgtcttttcaaatcactattttcatgatcatctatctcatgcgttcttttacccatggtttctatataatacggtaaactctacacaaaacagaccaatactgtcaccagctttaaatgaaaaatcatcacaataatttttgaaaagaaaaaaaaattatttttttgtgtgggtgctgcacagccttttaaaatcacctattattgtagttgttattatacctgtaagaggtggtcttggaaccgaatatactctggtcattggtattctgttgagtgtgaagcactcggtagagatgttgtggcgtattggattgaagtggtgtaggattgtattgggattgtgatggtgttgaagaatgcccgattttattaactaaaacatcacctttagatggttcgtatgctgtattagtatcaatatcatccctagtattagaattagtagtagtattactatctttatctagatcattcactacttcaccccaatatcgttttctttgaattgtaggttgtgcattttgtgcagtttgattatttttgttattcattgattcagtataacattcaccaaattttaataaatgaggtttcttttgatatttaaagaatgcatcatataatctatcataatctaaatccaattgtcccaccttaggttgaattctttctcttgtcctttgtttcaaagttgtcgattctccactatcaactggatcaacagttggtctcatttcagatatacctgtatcactgataaatttaggtaattcaaacggtggtctctccacacctcttttcatagataagaaactcttcttagatctccaatgttgtggtactggaacagaatctggtaatgtttttaagtaaatatgtaatcttggatcttcagcatctgcatcaatccattcaactagttctggatgaatagtttcacttttaagaacgtataatggaataccatatttctttttaaactgtcgtttactaagtgattgtggatttgattctttagagtctttatctttattctcttcatcatctgaatcatttattttatcattttcacctttattatctcgatgaactaactgtttctgttcaacattttcattttctttctcctcctcctcctctacatcaatttcctcttcctttggttcaaacttctccaacacatccttatataattctgcaaactgttcatcaacaggtgtttcttccacaacaactatatcatcatcatcatcatcattattattatcttctttagttttcttaacttctactactttctttccattggatttctcctgttgtttcaataatttcgccctctctcttctcaactggttctttgacttcttagtcaccacaggattatctatctttgatcccatccttgtctagtagtacaatatgaaaaaaaaaacagtgtcttcccatagtaaaacttaaaaattcttcaaagcgctgttttcttcaatgagccttaaatggttttccttgatttattgccactgttttttcctttactttttacttattttcactattcgaccatgtctgaacttaagaagagaccctctgttactgaagatcttaagataaaaacaattccaacacctaattcagcaattaataaatcattgaaggaaatacaggaaaatcacgaatctaatgaaaattcaccaatatcgccaacaacaggtataattccaacatctaaagctgcattatcatccaatggaccaccatctgctgctaattcaatgaagaaacagaatgagaaaacattgggtgaaatgacacaggatattaaggctcaattgagtaaagcatcagaggagattgagagagcagatgcagagtttcaacgattgttaggtaatttagagaagaaagttgcagctttaagggttaatctgaatgcatcaaagtgattatatgatgatgatatgatacgatttggaatcataaaataaatttacaatgtagttcacaattcaaaatacagaaactaaaacttaaacacactaattataataacaataatgaataactacatgacaatgctcaaacacagacaactacatattatcatacaagttaaaacaccacaatatatacaatatacaacatccaccacacaaaaggcctcttctcctattactacgtgtgacaaacgcgttgtttttcttattttcagtttacactctattttcgattctctatttttcactttcttttctttttcactgtatctttacctctatttctaagtctcattagttaagaagtctgtcactttctattctcttactaatataatgcttatgctggagtttgcagtattctccaaaaatttgaataaaaatctgttaccaacagatctacaactaacatcagttagtcaaacgacgagaataaataatttaacaaaatttaaacgattgttaaatacaattacaactgataataatactaaaaacaatgaaataataccgaaacctataaagcaagagaagggtaaacgacctagaggaagaccgagaaagcaaattgatacaccatctgtattattacacaataattcaaatttattagataaatttagaaattttgaaacttatttacaatatgcaaaatttaagcaactacaaacaaatactggtgttttcatgggtaatttatatgagctgcaagttaaaagttttttagagaaacaatttaaaattcaaagtacattacatcaaggtggtagtaatgataaaggtattgatattaatgcaatttggaatccaatgaatattttgaaaactgagaaaacagataaagatggtattagtaataatattgatgataatgataataagaaatatgaaatagttaatatgaaaaaaatcaaacctttggcaaaaagaagtaatcaaacgattaaattatttgttcaatgtaaatgttataaattatctaaaattgatccaaaattgataagagagattaagggatcatcacaggaatattttaagaaaaatgggaattcagctattttcatgattgcatcaactaatggatttacaagagttggtagggaagattttgataaggcaactataccattaatgtatgcaaaatttactaaacctaaattaattaacaaaagatatccatttgaaattgatagttgggaaataggtaaattagatggtgtatatttaaatcctttagcaactgcaatgtttaaaggactggattggatatcgtttatgaataaattaaaatcattaaaataactaagaggtgtaatattatgtataattaggataaaaaacataaataaagtaattaaaggaaataatataaaatttataaaagaacaattatttatcattatttattagttctttctttcaggaatatttgaaccaattttaacttcaggaatttcatcaattttatcaagccattgacaaattcttgggaaattttctaattcaggtaatcttctaaaatttaaccaagggaatgaagcaatatcagcaatacttaaatgatcaccaactaaataacctgtcttatttctagctaatctttcctctaagacacctaataatctaattgtttctttatgatatctttcaattgcaaattcatccttttgaggtgcataatatgaaaaccaatggaattgacccttcattggacctaaacctgccatttggaaaaataaccattcaatcatttcataatattcagctgaaccatgtttataagaatatttaaaatctttatcaaatttatcaactaagaacattaaaattgcacctgattcattaatatgagtaacttcacccttttcatcaacataagttaatgaaggaattctaccattaggattaaattttaaataccaatcttccttacattctgattttgataaatcaattggtctaacataataatctaattttaataattctaataaaattgtaatttttaaaccattcggagttggtgatgtgtataatttaatatatggagcaattaatccaccactctttggatcattttcggaaataatgtagtgtaccattgtaagttaagtattttctatgacaattgagctatcaaacaggcctgaaagtagaaaagaaagataagaagcagcatatataataaagattagtaattaaatccacttcggatggaaaggtccttttatacccgtagaagaaaattcccagaaaatttaaagtgtggctacatccctacttataatatgttttttagcgatttaagaaaatttccctgaatcctaagtctatagttcccccctcaccaatatctcataaatatcacatttgtagccgcgctttttctctatccaatcatgtacttagtttttctttccagtaactattgatggagttattaacgtttttagtttgaaatttgcgttttttaacaaagtcctgtcaaattgtcattagccttgagcatttcggacattgctcattgtaatctcctcacttgattgtataggaaacttcacgaacatattgtttaccggttgttttgtacttgaaaaaaggttgctgaagttagtgatttttttggtcctatttttaggcacttatttttgatttttgaaaaattgggaattaaatctcaaaatgtctctctgtaggaacacaatttttttgcttctctttccaatagtactagtggtttgtttgtagctattttgtggaagtcaaacaattgcaccggaattaatgataaatcaccatacaaaatcggtgttaagccacaacaaaatgagtgtcgtgatttttggtgaaaaaaagcaaaaaagctctttttcaagagaaagtaattaagatcattacgtaagattataaagatattataagtagggattcttagcccatgatttcccgctagggaaattatttaactacgctaagcgtagttaatatattaatatgaaattattattataaattagatagtattatcgtataattattaactccggagaacaatggagtttgtgttgaccgttgcagagacaaacaggttgagagaacaggtggggttgaagttgatccccgataataggagtagtaatgggaaaggaaataggaaacacgggaaaggtgatggtaataatatgattaattcattgagtattgcagaaactaataaattacgagcaaagttaggattgaaattaatacctgatgaatctaatattgataaagaatttaataattttgaagagttagagacaagaaagagacaaggtgaaaaattagttaaattagttgatgatattgaaacacagaaacaacaattaaaactaaagaataggatagagagaggtggtattattgacagattggataaatcttccaatgatggatcgaatggtgatttagatttagattcttggttgagtaaagtaggcggagaaatcaaacgtggtgttaatgctaagagattagttttcaaaaatgataaaaaatctaagaaaatagaaacagatgtaaaggaagaagacatacctgatgttaagatatcacatgataatgaaaaaattaatgaaatgattgaaaatggtaatgaagttgtgcttacattaaaagatagtaatgttttagatgataaagatgaagatgaattagttaatcaaaaattacagcatgaggaggaaatacttcgaaataataaggagaaaaataaattagggaagttagtaacattagatgatcatgcagatgcaagtgataagaagcgtaaattagaatctttagaaattgaatcagatgatgatgatgatgatgatattttacatttgaattatgatgagaatctagatggtgaaaagaaaatcgataagataatgaaacgtgatttttctaaattcaaaaaacctaagaaatctaagagttctaatgttcaaacgagaaaacgtattattgatgaagaattagaagaaagagaattcaagccagtgatattaaatgatgatgatgatgatgttagtagtagtataattgaagatgatttggagaaagtacttaatgaaagtagaaaattaaaatcaaaactaaaattaaacctgaaagaaattgttaatgatgatgtaaataaggaaaataaatcaattaatagtataagtgaaagtttagaatttttagataacatcaaagtggatgaagaaatcgaagaaccagttactaaagataatgaagaacaaaatggtaatgaattattgagggataattcaaaacctgagactgaatcacgttatagaacaatattggatgatgaagaaaataaatttaataataataacaaatttggtatttcatctgttttacaatcattaaaaagtaatagtagtagtaaaaataataatggtaaacttggcaacagtaagtcagatgatgttaagattgtttatactgatgatgatggtaatgttcttgatactaaacaagcattcaaatacatgtcacataaattccatggatctaaaaagaaataatatttgtgtaactttacaaaatagctttttttcaattttttttaatattacaaacagaaaatacaaaataaaaaaggtaaataaatataaaatgtagggtataagttagtttaaatattagactttagagacaattaaattttccagaattaaattgtgtctattagctttaatctcttgagcttcacgcttaatttcattggcatctctattttgtctcttattcttatgtttatcaaaacaatgtctaaaataagaaatcaggcaattgttcagattatctgcatgaacatcaactgagagattacatgtattaccacaaattccacaaactgcaactaaaccttttgcagttttgccaaaaactggaattggcatttcattaccagtagtgtaaacaccatgatctttacaaacatggtgcatatatgaggaatcatcaacgccatgaaatatagtgtttaaatccatacctttagtataaggacaataagggcataaattttgtgtaattggcttctttgtaccatttttcttatatctgataacaagtggttggtaaaagttttgcttttgattacaccatctcagagaaatgtaatcatccaaagcacgtcttttattaactttatatttccaaccatcttcatcttgcaaattttcaaaatcactaatatcgacatagtttggcagtaatgaagcaacaacatttcttttaataattgatgtatcaatagcataaccaccaactgctttcataatttggctttcattagtagctaaatttttgaaagctggattagaaataataacttcccaatatctatctgctctatcatatgagagacttgtataaacaggcataacccttttgattgtaactttatgtggtttatttgcaaagctttcttgagttaaatttatttgttgaacatcgataactgtttcggagacagaagtttctgtaatcatttcggtagaagcaacatgctgtggaacgttttgtggaaccaattctaattgagacatattaattgatgttgatggataatcaatatcagtaacattgttattagtggtattgttgaaaatagcttcaacgtcaaaattatcaagaatattttggagttcttcatcagagagaattaatgaattttcattagttggtaatgataaaggttgttctaattcagtttgagctggaacatcaacaaccgcaggttgtgggttaaataataattcagaaacatcatctgttggttcaatgacagtttcattttcatcaaggaaagcaattgcttggtctaaatcaagttcatttaaaccagtttccatagtgtaaaaattatcatttggagcaaatgtagtttcagcaagatcgaagtttaaatattcagattcatctaaacctgcattgatatcaatgatagctgcagttaagttagtagtattattattggtagattcagaaacgttaacattctccagtttcttcgtctttttcttcctttacaggttcttcgagctcttcacaaagctcattcaatataagcgatttcatcaagtgttaaatcatcatcagttgatgaacttgtgttgttttcaaaagtagtagtagtagtagtatcttcaaataaagattcttcaaataaataattgagtgattcatcatcagaggaaacaaagtaggaagacattttaaaataaaaaattcaagcaaaagcaaaatttaatagcaagctaacaaaaaaagcaaataattgggaaattcagcaatgaaacaaaaaatcagtgaaataaaaatataagcaaaaggcgaaaatgcaattgctattaaggcggtcagtgaaacgagaggtttaactgctaaaagaagagaaagaaagaagtggaagataaatgttaaaattaaaatccattaaaagtggaaaagatgtctccttttatagtttttccaaatactaacaaaaactgtaataactgatatttctgaataattgtgaaatttgttagtgaaaatagctttataatacaaaaaaatgatttcgcttcctaattgggaaaaccaaattgcctatttgggtaaattggtcattttttgtgtcatgtcttctgttatttgaggtatatttctaattaattaatgcattaaagttgcctaaaagggtaatagatgcatctagatcaatttaacttgcatatttccatggttgaaataccttctagaaacaattttatgcatgtttgatgcatatcaagaggtaattctaaattttctgcctttttttcttcttggaaaagtaaacaaactcgtaaataaggtgaattaattgaaataaaaaagtctggtactcgttctttttttctttgaatagtggctagactgaaatgaggagaactttgaaagaatataagtaattaaataaggtagcaaaaatgaaagcaaatactagcaacattaatttaacataaatagcaataaaaagtaaacgattaaagttaagatttataagttttaagcacttttttaattatatacaatattattgaagttaaagaaatgattaatttgggaaattaatggttaataccggagttttgaaatagcaaattttgattaatttttttgaaattaaaaaaagcattttttcatgttaatattactaaatgaagtattaaaatgaaagaaaaagttttttaaagctttactggattacagacattaataaaatttaaataaatcaacttcgaaatacaaaactttcagcttacgtaatcatgaacaataattttagaactagcaatactatttgaaaaacacataactgggcgtgtggcgtagttggtagcgcgttcgccttgcaagcgaaaggtcatcggttcgactccggtctcgtccaatatatttttttaattctttattttttcacatggggaatattataattataaagggatgggttttaaaactatttaaaagaaagaagattgccacttttattaatttatttttatcttacttttgctcttccttttcagcattaccagatatgttgtgtattatatagagattatataaaccataagtaatagtatatttataaataaattttattgtataataatataaaggacattttttattattttcattttcaatttcattttcattttaaatttcattttattaagggtattgtgtattaatggtataaatatattatattatattatattatattatattatattatattatattatattatattatattatattatattatgacatatattcatcataatcatcatctaaatctgaatcacaatcataatcaaaattagctgcacatgaacttgttggattattataataagatgtattaatatttgaactactactactattattataattaatatttgaataaccattaatcatataagattcaatttcatttgaaggtgaagtatccattgaaatactaccaagatataatttataaccatcaattccacaatctctttgatttaaatcaaatgttgaatttttttcaattgttctatgaactatattattatcacttaaaaaagttctaatattaccaattggtgtaaattgtattataccaccatctggatgattaaatttgggatattcatttaaatctatattatctaaattaagttgatcttgtggaatgttattagtggtattactaccattattattataattaccattgaattgtttaacttttttaaattcattctctgattctgaatttcttctcttacatctaacatttctatgattagaatgtaatggagatgagttagcactattggatccattctccattaatttttgacgattggtatagtacattgcaggtaatggagatgaatttatgttcatatttctgttatgatgggtcatattgttagtattatgattgttagtattatgattgttagcactattattattattattattattattattattattattattattattattattattggcaactacagttggagagatattaccagtaatatacggatctcctatagtcattataatatatgtaattatccctagtaaaagaacaaagataaagtaaaataaaataagataaaataagataaagtaagataatttttcacaattaattaagtgaaaatctcagttcatgaaaaatttgaatttttgactttcatgtcgtctgcagaagatctttttattaatttgatttaatttaccttatcatatcttctttctcttcttctgagatcaatggatctatctaatctctcgactaacctcccactctccactaaacccacagaggaagcatttgatgcaatcaataaggaactttcagatgagtttaaagtaggggctcgttcaattgctgcattatatagactttcaaatactaaaaactcattacttatagcaaaaggttaccttaattcaattaatgatatttcaaatctattagataatggtaatatatcctcattggatgatttacgtcagtttttacataataaaaaattagaattatctccaaatgaatcattaaatgaaagcactacaactaccattaacaatcaagaaaggcaaatatcctcatccccatcaccttcagtaccatccaataatacatcttcttcttcacaattaccgcaatcccaatctttacaaataataggtcaacatcatgattttactataaataatccaactaatcatcatttcccattatctcgtactccaatgtcaattgataatactcatttaaaatattatcattcaaaatcaaaatcaaataaattaaattcatcaacaataacatcatcaaatcagtgtaatatatctgcagaaaataccaactctaataatttaatcaatatgaacataaataatcatcaaagtatagattctaattcaaataaacatttagataattcaagtgatgataatgtagagaataatgatgataatgatgattttgatgatatttcatttgatacaatgtcagatacttcatttttgaaaagaaaattgaataatgtttcaactatatcaaagaaacaaaaattcaatcaataaaattaattattacttaatacatagttctaaatatcgaacatgtcataatactattctaaattaataaatatcttttttatattattataatataaatacacttttctaataattatataattctatttctattcatatttatatttataccttacctataatctatcaactaacattgattgtgctgccataaatttctttttgatattaccaactttatcttgttgcattctctcactaaatattaaccttattaaattcttccaaccttcttcactaaattgtttatttttcagttttaaattttcaaaattacttaaaaatttctctcccatactaccaattgtaaaatattcaatagaattatgtataatctccgtatttatattattactactattatcaatttcattatcaatatttttaataacttgttgtaaaactcttaaattaacaatcattttattccatccatttttacccataactgatattctacgactttcaaatataactaatttatcaatccaaaatcctaatcctccaaatattctaattttaacttcacttttccttttattaataatattttcactaactttattgaaaattctatttatattattaatcctttcacaaaatttatcaatctctaaatcaacactttcatcaccaataatttgccattgtttattaatcatcatttgaattatactccaaacacattcaagtcgaatttcatatctaattaaaatttcaacttcattcattaaaaattgtaaattttcaataattttattgaattttccattcatttcagaattaagtgctaaatatcctctattttcaaaattatcttcaaaattattactaataacattactattatcattaattatttcattatcatcattatcattatcaatatattcattgaaatttaaattaatattagatatttgatgttcattatcactaaataaacttaaactccaaatttctcttaattcttgtcttaaatcaacattaataattgttttaggtatacctttcttcatattcggtaaccaacttaaaatattagataatgatgctaataaatcaactaatgatctcatattatcaattgataaaaagctatttggattaatatttggaataaattctccaacaattgataatgaatatgttaattcagttgattgaagttgatataattcatcatttttgttattatcattaattaataatgatttaacaatattatttgagatacccttcaatttcgaatcattaatccaattcttaattaactttgaatcacttaattttaataaaatatctttaacttcattaaatttggaatctaatttataaaataatttgaatataatatcaacatatgatggtctataatataatgatgtatctaataaaattaaaactttattgaaaaagattttgaataaattcgatgcctctaataggctattaactttccatttattttcacataatttatcaaattgatataataatgtattttcaagttgtgaaataaaaacaatatccataaattggttgaaaaattcaacagcttcttttccaccagcattatcatttaaattatcatgaattgatgttaaattacatgtaaaatcaataaatggttcaataatatatgccatattgaaaatatttgggattactaaaatatttctcttactttcattgatatcatcagaaccaatgaaaatagattcatcaaatttatattgcaaattaaattcagatcctccattattactagtttcaccaaaaatattatttaatgatttaattaaatcttttgaaattgaattaattgataattgagaaaattcgaaaaatgtattattgccagtttgttcaaattgttttgggattttatcaaatggtgaatttttattctttttcttataatttgaatctaaattatctaagttatttaataaattattatcaataatataattaaaaattaataaactaatttgcttttgaacttccctccaaactttatcaattttatatttataaccattcaatttaaaaatttcgtaaattgcaatatgtctctgtaataataataataataattttttaaaaatattttcaaaaacttctttaataattaaactattaaccccttgtaataaattaaaattcatgaatggatcatccttcttcttattatcaaatgataaattgatttcaatttgtgttggatatttacttttaacttcactaattgttcttctaattacttgtttaatctctttttcacaattatcaactaatcttgttaaacattcattttctttattaattttttgaatttgtttaaatctttcatataattcataaaatctaccattttgaacttcaatttcctcattttcatcaattatttcattattaataactttaataaatgcaaataatcccatatttatagattttcttaatgaaagtccggaattaaaatctagactattagtattatcattgttattagtattagtattactagtactagcacgattatcaccgttattagtactattacttattgttgttgataatgatgaagaggtaaaatttttataataaatatatccatttaatttccctaacaaaccatcaaataaaacagagatataactatttaatttaacttgtaaactttgtaatgattcaatattaaataatccattatcactagctaattcatcaatctctttaactaaattaacacttttaacaaattcttgattttcaataaactcctgtaaatcattcaatttctcttgtaattgattagttttatctaatatttctaatgtttgtaaatattcaattctcttattatttaattcattaagtatatttgattttgaattaactaattcattaactgatgataaatttttcctaatattagttaatctatcctgtgattgatttaatgtctcaattgaaattccatatgatccaatactatcattaaataccatatagttttcattaactgatctctgtaaattaacaataaattgtttccttaaatcttggaaattttggaaattaaatgattcaccatcttcaattaacggtaatgcaatatctaatggattacaatcatctttaaccaaatttggccaatctgatccaaacacagtcaacacatcctctaatgattgaattgacgagctcttattgttaggcattggtctatatagatatggtagatctctttgatccgtaaataaaacagatgttgttgttacttagtgaaattgaagatatcggccatttcgagcattaatgttcagatcagttaacatgctttaatcttcttcttcttttctttgatgttgttcttttctctatgcgtctataaacgttatttaatctagaagtaatatatagtgtaaataaataaaatacaaatataaataaataaataattaagttaatgatacgtacctattttggatcatcaaatggatgtctagtttcagttggatcaattttaaaaatatgatcaggattaagaatacctttcttatcaagtgcaaacttaatacttctcattaaatcaatagtttcagtacctagttctctttctaaaaattctctcttttcactaataccaattccatgttcaccagatactgtaccttctaattcaacagccattaatgacatttcattaataattctatgagcttccttaacttgttcgggttcaaatataactaaaacatgaacattaccatcaccagcatgacctgcagcagttgctaataaatcagctttatctaatttatccatagttttagtgattaattcaggtaattttgacattggaacacaaacatcagttggtaaaaccattgcatttggtttaaattttttagcccaacttaatgaattccataataacgttttacgaactctccaaatatcttctttatcttcttcatctttagcaacttgaaaattaaaggcattattattctcaccaattttttgaactttatttataatactattaagtgaattatcatcaactgcactaattttcattaataataaatgatctggataccatttacgatcaccacctgaacccatttcaacaactgcattcatttgtttattatccataaattcaactgcattacatgaaataccagttttaaataactcagatactgcctttgatgcatcaccaatttctttaaaattcattaatgtaataacttcattctttggtttaatatgtaattttaatgttgcttcaacaataatacctaatgtaccttcagatccaacaaataaattagttaaattataaccatttgaactctttcttggtctttgtcttgttttaataattgtaccatcagctaatacaacttttaatgataaaacattatcctttgcagcaccatatttaacagcatttgtacctgatgcattagtacctaaaataccaccaattaatgcaccaggtgcaggatcaggaccataaattaatccataaggttctaattcttcatttaaatgcccccattcaacaccaggttgaacaacaacatctaaatcatcttcatgaatttctaaaattttattcattttagatacatcaattgaaataccttttctagttggtatataatgaccttcaattgatgtaccaccggaatatggtataattggtattgatgaatcataacaaattttaacaattttagaaacttcctcaattgatgttggataaacaactgcatatggtctttcaccttcccttgcacgtacaaattttgatggatcctctgaatgtgttttaatttcattttcacttgttgttatattctcttcaccgacaattgcaacaattttagataatgcatattgaactctatcatttgatgcataaactaatggtttgagatcttttaatgggatagttgatttagttgattcttccttattggcaagtataaacccaactgcaaacccaactgtaaggaaagtcgttgaaagtgcaaatgttttgaaaatatttgttttgggacttaaagaactatcattgactgttgtttgactgtattttctacagaaagttttcaaagatcttactgatgatcgtgaagtacgtgtaaatgcccacatatcactctaccactacagaaaatacaaatataaagactacttcaagataagattcatactattgatcaaagtgaaaaatcccacatattttttcaccctgtgttgcaactgttgattaatctttccacctaatggacacttatttgctgatatactaacataaaccgttgttagtagtgcaattgacaatagctcatcgtccagtgatcataattgaactgctatatgtcttctattgaggttatttcactataaaatgtgccgtatagatcaaaggcctaactcattcagagacttccattgtcggacatttcctatttaggaagtcccatcaggtcgacatgttataataaaccaatttaactactaaacacacacttctttcttttggttcggattggtttaacatacattcaaccatcaaacaatgcttcctgaaaaccacaatgagttccgtagtgatacatttactacacctactgaatctatgattaaatcaattagtttagcatcaatcggtgattcagtatataatgaagataaagatacaattgcattagagaagagaattgcagaaatgatgggatttgaagaaggtttattctgttgttcaggtactttatctaatcaaattgctttaagatcccatttattgcaacctccacattcaattatttgtgataatagaggtcatgttttcgttcatgaagctggtggtttagcaactttatcacaagcaatggttactgatattattgcaagtaatggactatatttaacattagaagatattatcaatagatatattccagatgatggtgatattcatgcagctccaactagagttgtctcattagagaatacaattcatggtttaattcacccaattgaagaaattaaacgtattagtgaatggtgtcatgataatggattaattttacatttagatggtgcaagaatttgggatgcaagtattgcaactggtattgattttaaagaatatggtaaatattttgattcaatttcagtttgtttatcaaaaggtttaggtgcaccaattggttcagttttagttggttctaaaaaatttattttaaaggcaaatcatttcaaaaagcaaaatggtggtggtattagacaatgtggtatgttagctagaatggcaatggttgcaattgatgaaaatttctctaaaatgaaatcagctcatattatggcaagagaagttgcagattatgcagaaaatttaggtttaatatttgaaataccttgtcaaacaaattttattttcttagatcctttaaagaataaaattgatccaaaaattataactccaatcggtgaaaaatacaatattaaaatttcaggtttccgtttatcattctctttccaaacaagtaaggaagcagttgaaaatttaaaacttgcattaaaggaaattaaagaatatagtgaaacaaatccatatgattcaaataaagcagttggtttgtatcactcaggtaacaaaaaacaagtttattagttaatctattatacataaagttgtaaattatatatatacacattaatattaataattctagattttcagtatttatcatttaattgtaattagaacctggtcctatagaacccataatgttattgatactgttcgtcggattcattggatctggagaatttggaaggttggacatacccggaatgttacccatattacccatgctacccatacttggcatacttggaatacttggcatactaggcatactttgcatgctgggcatagtttgcataccaggttgaatattttgtattccttgcattccttgcatattttgcattccgtgcattccttgcatactttgcatactttgcatagttggcatgttttgcataccaggttgaatattttgaaccattgtcatatttggtggtatattaccgttttgcataccttgaaaattttgcataccttgcattggcataccttgcatattctgtatattctggatattttgcatattttgcatattagaaatattttgcatgtttggtacgtatggtgaatgtgtacgtgacacatgtgaatggaattgttgtactggcagttgttgcatcggcatgaattgtggcatatttgatatttgtgatatcattggcttttgttgcaaatattgtggttgttgatgttgtggcagaggttgtgagaatgattgtgattgttggtattgatactggtattggattggagctggagattgctgagatgatcctggtattattattgaatttctagagtctttttgtggtgtatcacttcttgaaatattggattgactttttatataactaccatttgatggtgaaacaaatggagaatgtgaagttctctgctgttgctgttgctgttgctgttgctgttgaggtatttgtaacattgtttcattaattaatggtgatcttggtaaaatatcttcatctttaagagttttattatcattattagcatttctgttactattgttattacggttagcattactatcaagtacactatgatcagtaaattttatacctaacaaatcattattagttgatattaaaccttgacttattgatgaactattagaaatattacccatcgcaggactttccttttgcatttgttccggattgaatgatgaaattaatccaataacatttttatacttatccatttcaaattcagaattcattaataaatcaaaatcttcaggtttatcaccagttgtattaatggaatcattgattgatttaccaatattattactcatacttacaatgtcatgatcattttttctattcttaatagtttcattctctggtttggaattgttaacattcacattattggttccattttgtgggttattaaccatattcatattattgaggttgctgttcatattcatattgttggtatttttcttttgattaatatttgaattactattactactattatttgaactttcagtacatctataaacatattttttcaattcacataaaaagttcatcatatcattaattggttcacaccagaaatcctttaattgtgataatgatgtaagtgcaagatcaacaacatattttctaacatcacctgtaaaatctagtaattcatcttcaaaaataaatcttttaatttcttccggtaaattattaagattatatcttttagtaggataatgataaatatctcgtataacaaaataaatatactggaaaggatttgcatttttagtaaaccatctatattttgataattcaggtgaaacgccaactctaattttggtttcgtataatactaagattgaaacttcaattgttgtttcaaaatatggcatacgtaaagttaaaactttattgaaaaaatctttatttgaacttgcttgacttaacttggttaattcaacattagcagcattagcaggttttaaaataactctattatgatgagaataaggtcttctatcacatgctctatgtaataaataagttctatgaacgaaaattgctgcatttgaaactaaccatcttaataaaattttagaatattttggatttgattcacaactgaaaatttctttaactaatgtattaacatcttgatataatgcaacaacagttttagcaataccttcccatcttaataatctttcattatcacttgaaaaatcagaatttaagaaatgtgaaattgtttccataaccaaactacatttaaatctactaattgtaaaaaccataaaaggatttaaatcaccatcaaatttattagtttcatgattataatcatatttggaaggaaatttagttgatgcatttgtcataatcatatgaggagacatacctgaaacaatcgaagctgaagtatctaaaaatctaacataatgccaaactagtcttctaacttcaatatctttaatatttttagtatttggataaacatcatgtaatagaggatctctatgtaagcccataaattctgattgtcttgctaatgatgcagtatatgtgaaaataccaatataatagatacaactactttgaaataaaatgattgatgattgaatataagctaaatttggattagttctgaaaccaaaaattaatttaaacttttcaaaagtatcataaactctactcttttcatcttgaattaattttaattttgaaggatccttttcattaacttcaaatgctgttttaacagctaataacattgctaaaaataaaacacctgagtcaatatcaaatctaggattttctggatcatttaaatctttccaaaatctaatataattattcattgtaatttctctatcaataattggtattaaggggtgaatataatcccaatataaataaatgatatcatcaaaactttccttttttggatattcttcaactaattgatcaagtgtaattggtaatccaaatctttggaaatcataagttccaatatgtgagaaatcatttttaatttgtccactttcacctacttcactcattttaaacaacatcattctatttaaacttggttctaaatatgggaaaaatgctcttgaataatataatggggtattacttatatttgacataaagactggattattagattctttcaattggacttttttcggtactttactactattctttttattattagtttcaatactggtatttttactgtttttgctttgctggccttactggtactagtagtgtcattgcttttggtattagcattgatatcatcattactaatatcatttttatcatttttatcatttttttctttataaattgatatttttttagttagttcatttgaaacattttcataagcagcaacaatatcaggatttaaatcatctttcaccttcggtacagtttgtaaaacgtgacctgtataatcatcatcaatactattgaaagcatgaggatcaattttatccttaaaatgataaacacaatcatgtttagttcttatacatgttgaacatggttgattacgatcacatttgagtttatgattataacaatattcacaagtgagaatacgacgacgtctgcgctaatttaggcattattcactgttaattaatggagatcagatacgataagagtatagtcgtttatcttactaataacatcaagcaagacaatgtcgtcttattaaatttatgcacgtaatcctaaattagtgatttttttcgattttttctcaagggttgcaccccatgtctatgatgtaatgattttctttctggttttcattgaatatctattgtattatcattaggtagtattattattattattaaaagatcattaaacattatataagtagaaagaaagaagaaggaagaaagaaataaacagagaaaaaaagaatgatgagaagtagtgtctaaaagtagcagaaataaaaggtctgtaaattatagatcaaacgttatgcagcaccagcagtactaccaagatgattcattgtagtctcttgtccaccacaacgaacaattcttttaccctcagtatcattatccattggaactgatttgttttcaattcgttgttgtttccaataaatattttcactaccacctaatttaccaattctcattgtagctaataaatttttagctgcatttgaatgttgataaactgcacctgtaaatgcagttgttgcatctttaccatgagatgctttaattaatggtaatccaccaggatgatctaatgcaaatggtgtaacatcatgaattataccaaatacaacaactaaatatcttttaccctttgaattttcagataaaattttaaattcttttgcactataaattggtaaattttcaattggtataccccaattaagttttgatctaatactatcaagtaaaatttgttgttgttgaattaaagatttttcaattgtactttgatttgcaatttttaaattattaattaaaccaattaattgtaaaattctaattgtccatttagttggatcaaaattataaatttcataaccatttctataatccattgggaattcatgatggaaattttgtttaccttcacccattgtaattatacctaataaatagttatctctaacagatttaccattattataaggtcttgaaccaattgtatgaccaattgaattaattgaaaatatacaatgttgaacaattataattttccagaatcctccataaattaaaccaccgatataatcattccaaaaataaccacaaattaaactaggtaatattaatccaatagtgatgaataaattaaaataatatttagcttgccaattaacaatattttcatttggtaattgatcctaattttgattgtttaatagcaattgaaactttattatgatgaattaaaaacatccaaccaaaatgactgaaaaatatacctttccttatgttatgaggatcaacatctgttacatcacaatatctatgatgagctctatgagaagaacaccaatttttagctgatgttataccaccacctgcacaaataattgataaaatttgaacaaaatgttcatttgtaaaattaaatgaattatgagaccaataacgatgataaagtatattaattgaaattattgtaataaaataattccagaacataaaatataatgtatttttgtttattttagggtgatatactgaaagttagtaaaatacctaataaaggtattaaaacaacaacagagaaatttttccaatgaatatgagcataccaatgtcttaaattccatgaacgttcagataattgactccttagtatattaacattattagctcttgatattttcaatttcttcttctttttgatcttaacaacaacaggtttatcaatggtatcatttacagtattaatatcatttatatcattaaaatcattgacattctgagttatatggttactttcaatattatatttggcaagttcctcatccggatacactgcttcctctacaccatgcataattatccaaggaaagttccaatgaaaaagaaaatgatgtgataaatctatattattacagaataatcatcaccataactgaaaataaaaaaatctagcgagcttaatgatttatatacggggttatacagtgttaataaagtagagattaagagacaactacgttttgatgtaattcaggtacaggagatgaaattgcattgacaagtaatttgacaacatctgccttcttatcttgtgcagttttcttaattttagataattcagttttaacttcagtttctgcagttatctctaattgttcatttgaacctgcaaattcatcttcgaatttctttaattctgctgctttctttgccttatatgcctcaatttcagcttgtgcatctgcctttgcagcctttaattttgatgcacgatattgtcttgcctttgcaacaatttcttgtgcatccttctctgttttaagtaaacttttaacaccgtcctattcaattaatagttagtatttaattcctgaaaaaccactatagttcaattctgtgataaaataaattatagttacataccattgtaataaatgatcctggatattaaacaatatttatacaactctaaaacaaaggaacaatcaatactaagctgttatcttagagaagcagccaaaaagtgaattttactgtgtgaggttaaaatattattatgcaccgacccatcgaccctgttttatgttatagacgcaccgaccgctacatgaattcatcattttcatattccatacgtattacccgattaggaaggtggaagatatacagtgtctagttcatctaataaatctttctgtccatagagagctcctattatagacacgatattcttaaaataatggacattctcttcattggagagtggaatctgcttcaatgcctttttacccaattgtcgcaacacactacattcagatgatccaattacatcatctaatgacgttaataatgcaatggtccatacgtacaaattttcttcaagattaacacctaaccatttagtacaataaaccaataatttaatatgtaaattttcttcaactatttgtgcaacatattcacgttcacaacttatttcccaaataaaggttttccattcctttgcagtattaggtaattctatcgcatcaagttcctctaattgcattcgaaattctcgatattcatccctcttcaactgaaattctcgtatatacttggatatttcttcaggtatatcattcatttgacttttacgtggtttataataaactttattcatatcaccatcatcatggtcattactaatcccattccccatatcatcatttaaagcctctagtcgaacttgtgcaagatattcttcaactgtactaggtataacatttaatttaacatcttcaatattaatatttattggaaatgctcttctttgtccaaacttattatctaatggtccactaacatgccccaaatatttctctatatcatcatcatcataatcagtaatttcattatctttcctctttttagtacctggtaatgatgttaataactcatcaattgatcgtttactcattgaaaaaggagaagaagtgtcagtgataaaattacgtaattttgtaaatgtactttattgaaaatttacacccttaaaaatacaggataatctattctttagacagatactaccattctcaattcaatgtcacttaaacgacagagagaatctgatgatgaagatgaattacaggtgaaaataccaattgttgaacaaaaagaagacgtaacggaagaaataatagaagatcaaaacgatcaagataaagataaagatcagaaaaagactaagaataagaataagaacaaaaaacctgtatcggagcctatatcaattacatgttcattaccaccaatatgttcacaaaatccgtgtacttttgaaacacacagtacatttgaattacatattttatcaaatcatacaaatatttgtacacaatgtaagaaaaattttccaactgcaaaattattagatctacatattttagagaatcataacccatttattaaaattaaattagagaaaggtgagccagtatttggatgcttttgttgataattgtgatagagttttcaaaaatcataaaaagagaaggattacatttaattgataagcactgattatccaaaagattatattttcagtattgttgataatgggatacgaaaaaatgattcttcattaatcaaaaagaatcaaaataaatcatttggagtttggaaacctgcataattaaaaaaaagagaacatgaactttttaacttttataaagactttaattataatctaaatttaatatggaattaattatgaaaatgtttatttgatagataataatttaacatcgaaggttaattcagaatttgctggaatacctggaagtttagtactaccataagccattggagctggaatgacaattcttctttcaccaccaactgccatacctgcaacaccaacatcccaacctttaataacttcacctttaccaagaccgaaatggaatggtttaccagaagtgtttttatcaaagactttaccgttctttaatttaccaatatatctaacaccaactttttgacctttcttacaaactggaccagtaccaaaagttttatcttcaatgatgacaccacctggtaaagttttaacagctggtttcttcttttcttctttctttacttctttctttacttcttctttcttcttcttcttctttcttttcttcttctttttagtttcttttttagtttccttagcttttttttctttcttatcttctttcttttcttccttctttgattctttcttttcagctgctggaccagttggaccttgttctaaatctttattaaatttaacagatttttcctttttagaatctttctttgcctttttagtatctttaacatcgactgcttcatcatcagcttgtcttttcttgttatcttcttcaactaattcttcaattttaccttcaatatcttcaacattatctaattcatctaaatcatattctatatcatcaataatttcatcttcatcaggtgttaaatcatattcatcactatcgtaatcatcttcatcatcagtaccataaacataatcatctgcatcttcatcatctggatgattaatgtaattaccagttaaatgaacagtataagaaccagtaacgacaaagaaaaccttttcatctggtaagatagttacatctaaagtttgttgatattgagtttgtggagaaagagtacaaatgatatgttcttcaacagcttcatcatcttcaaaatcatcttcatcatcttcatcatcttcatcgtcatcttcatcatcatcatcttcatcaccatcgttcatctttcatcaactttttcttctttatatctcagcatcattacttcattacaatcatcagcatcatcatcatcatcatcttcacctgcaaaatatatcagcttgttttaagattcttaaagttgaaggttcctttttatcatcaacagcttcagggtcaattgaagctaaagtaattctaacagtaactgggaaattttcattttgacatggttgaggagagaatggttttaattctaaattatatgaagcaattggtaataaactagccattgtatgtgtatttatttaactggtatttaattgatttattaatttccaaaagaaaagtaagtgaatttagaattaaatgaaaaataaagtataaaattttttttacatgtcaaaaattttttttatcactgcatagtaaatttaaatatggctgaaaaatttaaattttgtaagcttaaaataatattagtagataatagtttttgataatatgttatctattctattactatatcatatctacattctacattgtactagtgaaacctatacttgataataaaaactacttgatagtgttaattcataattgaaagttatcttatcttatctaataatttttataaagtaaatacaatacaatactatactaaaataaattagaaaaccattgcatgtggtttatcaccagattttaaggagaaagaagctgctaaatattgttttaataaaggagttttcttaatttcagagattaaagctttatcaataattttttgatcttcaattctttcagatttaatttctttctttgcagaaccttcaccaaagaaatcagattcaggattttgatttcttacttgatttttctcttgcaaaatatgagacattgaattttgataattctaatgatgaaatttcaactttagttgaagttgcaataacatatcttgaattaactcttcttaatggaacaccattaaccttgaaaggaccagagactaataaagtaccatcttctaagttctttaagtaaacaactctcttacctctgaatctaccagctaataagattaagacagtacctggaactaaacttgatcttaattgttgtggctttgcagtctttctagttttcttagcaacaacttcctatagtattaataattatgataataattatgttagtatttatgttcattcaaagtttcatttaatttaacatttagatatataattttggatatatgacacgaataatcaatatttcaccaattggagggggatcaatatcaccatattcataacttataaccatacttatacctataacatcatttatttgatatattatatatacataccgcaaccattatgtctacttgattaaaagatgcaattcaaagtcgtaaaatctgtagtagaattaaaaatttccaataaatttagtattataaaggtgaaatgtaaatattcttcaataatagctgctaactgtgaaattctcacactaaattctcaccaatatctaatatctcatttctcactatgtggaaaattatgaaagagaaaaaatttgtatcggtggtgcgcgggggtgtttcctctttgggacaatgatgttttctgtgcgtctatccaccctgggacctataacagatttggtggtattgcaggttcttcctcatcaaagaacaaatcactccagaattcatcattaaatgccatgtattgttgttcccaaccaaggttagactctggttgaattgcattagtattagagttattaggtggtggcatattgttggaagtattattggtattattatttgtaaaccatgtatttattgtaggattattattagtttgattaatattagtattattagtattattattagtattagtatttggactattaataatttgtaatattggagttggtggtgatgatacacttgaatattcaggtgatcctcccatatctgtacttgggaaataattattaatactacttatccatcctttcttatcttgtggatttaaatatgtgaatgatgtagtagtaggtccgctgttatctatattattacccgaatcggtaataatattttcaacattattattattattattattattaaaattgttattattggcattattattattagcattattaatatcattgatagtagatttatatgataaattccattgatttaaacatgtatgaataaataaccctaaaactattctaactttttaataaaatgattttttgaaaattttatagttgtttcatcaatttttttaattaattgtttaattatattcaaactttcatctgtaaataatttacccttaccatttttaggtattgttaaacttaaatatctgattcttaataacatacctgatgtataaagtattcttgatgtatgaaataatggattaactgccatttcattaatatttaatttattaaaatgttttaatgataatatacatgattcacaaatttgatgtaatgttgaataaaaaacttcattatattcctttgttgtaatttcctttgatttaactaatgtttgaattgcaggttcataaatatatgcttgaactgaataaatatatgacattaataaattataatcacttgaattttctttaaaattattaataattttaactttaagtaaattaatttgatttaaataatcaattaatgacattttatatttattacttgataattctaaaactgttaattgttccgataatttatgtatattattataaataaattccattaaatgattcatctttgcatatatgacaattaatttatatttccttaaatttgaattctctaatttaatacaacattcttcaagatattcagtccattctaaaaatacaactcttttgaagaaaaagtgatattgccatgtatattatataaacaattaaaacaattgattttatttctaaacttgtattatcttccttatcattatttgttattaaagttttcttaactgatccatcatctttattataaaaaaaatatggtctaccattaatacctaaatcatgaaccattgaaacacataatgatgtaaacatatgatatcttctatgatgaaataattctggtgctgaagtaccataaaatatataataaagtaatttttaaaatatttaaagatttattaccaattaataaaatttcacttgaaattgattttgctattaaacattctaattgtaattgaacttcaattgaaatttcttctctattatcagctattaatgcaatatagattcattcaaaacaaataataatggttcatgttctctgaagataattaatatttaaattatgtggtaattcaataaatggataccttggataaatttcattaatgaaaatacttaataatttacaacattgtgaataagttaataaattattacctaaaatatctaatgaaggcatttgggattcacataattgaactctcctctctgcagctttaataaattgtgaactgaaaagttgttgaaatatcaaaacttgaattaagtgttttaattgattcctgtgacaaattatctaattgtttaatttcatttgaataaatttgaagtttttcatttaatgataaatctttaatattattatctttattatcaaaacctttcaaaacttttataatttcatcccgtttccttagttcttctcttaaatgttgaatttcatcttgagtaacctttaatttcattgccttcgttaatggttgtttccttttaggttttttaacaattttatattcacaattaactttctttttaacacatcttgtacagggtccattgattaattttgaatcaactggtacacatttaacctttaatgcatgacatcgtttacaagcattggatcttctctttgatctagtggcaattgatgatgttgtagaatcatcatcatcatcttcttcctcgtcttcttcatcatcatcatcgtcgtcatcctcttcattatcatcatcattattatcatcatctgaattttgatcccgttcattatcattattagttccattattattagtttcattatcattactattattatcattactactattacctaattccacgtgtccgaccttatcaagtaccactcctattcacaccctcttcacggtctttcttagttgcatcgccactcgatgaatcaataactgccttcttgacattattatctccatcaatattaactccattactattctgataaacctcccttatacctctctttctccttacaccaattccattatcaacactgttctccgagagtgtaaacatgctgtaatacctgcgtggagataagtctaattgccaaagagtatgtgcattaagttaaaaaaataaaaataataataaaatcggacatgcacccttagtaaattttacatttttatctccgcctatttttttaattatctccggatttttgatgtttttgtataaatatactattactaatcctctgtttgactctaaactctattctttttcattttcttatttccctacttctttcaaaacacaactgacaatgtctcaaatgagtaatcttaataactcgtcatcttcaaatgacagagactcaattaaaccttacactgatgaagaagctttagttgattatggtaacggtaatggtaatggtagtgaacatggtaatggacttggtagaaaaacttcaaatttactggatcctgataatgatttgattcgaacagtttcaaattatactttagctaatattatctctggtgaagctgctgagaaaacttatagtgatgaaaaattaattgatgaaggtaaattaccacctccaccaccacctaaatatggtatatttgcaccagagaacagatcattaatgaaatctttcttacttaaatatatagttgtgattattgcattttggacttttatacttagtgtttggtcaatttattgggggtcaatgtatcatagagagaatagattaattaatttaggtatattagttaatgttgaaactgatatttcattaccagtttctcaagcaatgtatttatcaacaattgatccttcaatttcaactagtttatcatggcattttaattcaaatttaactgaagatgaaataattcaattagttcatgatcaaaaatattggggtgcaatttatgttacaagtaataatgtttcaaatcaattaattaatgcttttaataatggtgaaaatttaaatacttcaaattttgttaaatcttattatgaaactggtagagatccaaatacaatgggttcaattgttgaaccaacattatacagattccaatcagttttcctcaaatatttacaatcggtttcatacccttcaattttaaataatttatcaacaaatcaatttgcaaatttacaaaatactaatttattatcatcatatccaattattgaatatactaatggtcgtccaactacattaataactattgctcctttacaagttggtttaatttatattattattattactttctttgatgttatgtggacaactccattatatggtgcaattgcaagtaaaatttatccaatgcattatattattttaagaatggtaatatcacaaataagttatctgtttatttcacttgcatttacaactcttaatgcagctttccaaattgatatgaatcaaacttggaaaggtggatttggtgttttttggatgatttcatatttaacaatgtcagcagttggtggtgcaaatcaaaatgtttcattaattttattttcaacttttcctccattaatgggattttggatgcttttctttgttattattaatattagtgctactttttcaccaattccattatgtccagaatttttcagatttacttatgcaatgccaattaagaatgcttatgaattattaaaagttgttcttttcgatactgcaagattaactatgggtagagattttggtatcttaattgcttggggtgctgctaatctgattttattacctttctgtatgttattcttcgctaatagaatgaagagtaagatgattaaggaaacgaagaaacaaattcaattagaaaaagaaggcaagaaggtttaataatacaataattttatcatcataaatctacattaatttattagcaatgtgggaatatgaccaaacttacgtttaatgtaacgcatttaattccgtttagttttttaagctctttttttcttctataaaattttaccgtatactaatatttaattttttaatgatatccacatatcatttccttcctaattttcttttaataccaaacattaacaattttaccattttgtttaatctttaattgtgcatatggtaaattatcaactttaataaatttttcaacttcaatacctttaaaaacatttatacgtggacaagattttaaatcaattttctttaaattaattaaatttgttaataaataatcaacaccttccctagttaatctaatacatcctcttaatgatatattttcaagttttgataatttgaataattgtaaaattgatgaatcactaacagctgatccacaaaatgataaatctaattcaattaaattatttaaatttgaaattaatgtaattgaattatctgttaacatacaacaaaatgataaatttaaaaattttaaattaggcataaattgtgatattttcaaaattgtttgatcgcttaaaaatgtacaatcttttaaaattaatgtctctaaattaatgaaataattatttgataaatttttaaatcctaaatctgtaattgttgtacatctcgttaaatctaaataagttaaattttgaaatgcaaaattaaataaatgattcattgaaatatctgttaaatatttacagtaacctaatattaaaactgataaattattcattgaaggatttttcttaattaaatttaatataacatcatccttaattttcctacaatttgaaatatctaaataagttaaattgggacatgaaattgataaatccattaatgacattgaatttaaattccaattatttttcaaaattaatttcaaaattttaccagaaattgaaatttggtgaattaaatttgtaaatccattatttgaaatatgataacaatttgttaaattaataacttttggtcttgaaccaactaatttaattatatttaataaatatgaatcatcaacttcattacaataaatcgataaatctaattcattaaataaatttggtgataaataaattaattgtttccatcttgcacaaactaatgaacatttaactaacgattttaaatctaataattgaaatactttgataaataatgaatcagttaatggaccaagatttaaatttgaagatctacgtctattttgattaattgatgataatctttgtcttaaatcatgtggtacatgaataaaatttgatttagaaatatttgaattgaatgattgtaatgaaccaattgaaggatttaatggtggcattgataaaattggagttgttggatcattaacatcagtattatcaaaagaaaatgatttaaacattggtgttgatgaatcatttgaatttttattaaaaggatttttgaataatggtggtggaggtaatgaagtagttgaatttgaattattaattgatgaattaattataatattatttggtgatttatttgttgataatctttgggatgcagtttttttaaaatcatttgcaatatcttgataatttaaacataattgatctaaagtttcagctttaataattattaattcacatttattaattgcacgaattgatgcagatcttgaagttgggaaagtattatcattaagtaatgaagataaaaatgcaaattcaccaaaatacatcattggtgataatcttgcaacagaatgatcattaattaaaacttcaacatcaccataaacaataaaataaatatctctacctttatcaccagattggaaaataaattccattggttgataataactaatttgaacattaagtactaattcatgcattatatttttaggtaaggatttaaaaatatgtaaatttgataaaaatttactaattgaaattgtattatcaattttatcaattgaagtatttaaatcattaaaattatttgaaattggaggtaaagctggaccaggtacttgagcatttaaatttgcaattaatgaatgatttgaaggtgttaaagaagattgaattggttgaattggatgatgtttattaatattaatattacttctttttttcaaaactgataatctttcctttgcttcaagatgaattattttacctatattggggaaattttcaataactgaatttaatgaatcttttgttaaaacacctaataaaacttttgatcttgcaacaacagttgcagttcttggagtattaaataaaataccaatttcaccaaagaatgaaccaggtaataattctgcatataatgattcaccatcagttgaagtaacagctactgaaccacgtaatatccaatacattgctaaagcaggttcaccagatttaacaatatattgatgagttgaatattgaactaaatgtaatttagatgataattcattaaagaattccactggtgcatttgaaaataagggaaaattttttaaatgaaatattagatctggtggagttggtaatgaacttgtagaagttgaagaatttgttgaagttggaggtgtaatttgaggtatagagtttaattttaacctcttcgacggtggtggtgtcattatgaagtgttattattattattattattattattattattattattaagataagattatatttctacttttgtgactgtgttgtattctattagtataatcttataatcttataatatacagagcttttattcatgcaggtacgatatgatgggggcaggcacgaaaatggaaagtgtaaattgtaaataaatggaaaatcattcgtcatgcatggatttataataatagggagttgtaaatttcttgaattttaatgagaatttttggataatttcttaaatccgacgtcttaaaatctattaagtaacttttactaatatgttcggctataagaacgtggacggcattaagaccggatttaatattattatctctattatctctattatctctatctgatggcaatgcaactataatggataatccaccaggtgatgatagtatatgcattgaatattgagcagttgagaatgatcttagagttggataagttgtggatgattgacctaattgctgagccaatgttttcattgaatggacgagaccatctaataaaattggatcaatatcgttttctgtagataatggttttaaaattggtgtgtgtttataatatacccataacatcattgtattagtgtggtgtgtataatagtatataatagtatattaatatatattgtattataagataataaataaactaactagaagaaagagtaagggctacagagtgttattataataatatataggggggaaacccaaatattttcatttcagagatcaaggagggaaaaagagtttgcggctggtgcggctggggtttgcgtggtagtagtagtagtattggtattggtattggtattggaattggtattggttggggttgaagtatgggatggagtgtatgagggggttgtcttgacatcggagagaagggagctgaagaaatcaacattggcaggtgcagctggtgctggtgttggtgttggagctgatgtagtggtattaacattggaattggtaaataatggagtgttggagaaattgtttgtttgtggttgtgtgttgaataatggttgtgtagtagtagtaatattactaggtgctggggcagttgttgcagctggtgcactttggaaatcatcaaattcatcaaaatcatcatcaagtaaatcacctgcagattgtgcaactgttggctttgcagttcttataggttcctttgaaataggtgttggaccattagatgatctacgtgcattagatgaatttgaggttacaactggactttcatcatattcttcaaatgcattaccacctgttcttgcctcttcaaatcgctgaccataaactcctccatcaccgaaaattcttgtttcatattcatcatcagctgatacactaataccacctctacctgaacctaaaccacctctatttctatttgtataacctcttgtactaactgaagttgatgaaattgcatcaaatttttttgcattttcttttgcctttttacgttcagttctaatctttgattcatcattaagtaaattagttaattcttttgctctattacgaatattaataccttgatcaacaccttttgaatcaatataatggaaagattttaacattgaaactaaactaacatttgcccttgcatcatcaacaaatctttcactaccatttttaactaaatattctaataattgtaatgatttataaatttgtctccattcatttgctgccttttcagtaaatcttctaaaaatcatattacaaatttcttctctatccttataagtgaaagtacctcttgcaatatctgccattaaagtatttgatgcaccccaaggttcattatttgttgcttctcttactttactctcaatttcagataaatttaaaacagcattttgtgccttacgtacataagacttaacttcccagagggacaggttcttcattgtcttgtttaaatccatattgatctagtggttgtttacttaaaagaagataatatactctgaagaacaacaaattaaccagccactgccaatgagataattaaaatcaaaatttcaaaaactgattgagattacattacataatacgattataaaggttagatactatagagtttaatacactgaaatgtaattattgatcttatcacgttgattttgtgcaatacattcacagatccatgtaatattacggatttccttgttccttggatttaatatatgcccatactgtagcaaatgtaaattgttgagtaaatgcatccttatttaatctcatttcatattcatagaaaaaatcttcaagacttttaccattttcatcatttgaatttgccgttgattcattgaaaatatctttataaataccaattgaactaattaaaacttgtaaattttctaaatcattaattgatgctaattgatgtttaatattttcatttgatgataataatccaatatttggtaacatttttaatttatcttccgtacttaattctgtatcaagtgaattgaatactaatattaatacttctcttatctgcttcaaaattaattattctttccataatttcattacttggagttggtaattcatttttagcaaaattattaaaatcttctaaatattccttataaagaatatttctaataatttcaatatttaaatcatctaaatcatcaattgataaacatgattggaaatattttgctaatggtgtatcaataagtacatgtttcatataatgatgttaaatcagttgcaattgttaaagttggtaaagtttcaaaccaacctaatgcattacattttttcaaaatttcacttttatctctattatgaattgtaccactaataattaataaaatattagtcaatcatataaccatatttcataaattctaaaaattttgttaatgttgaattactttgacttttaatatatgtgaattcttcaattaatttattatttaatttacgttcaattaatgatgttgaaagtgtttcattaatatcatgataatactgaactatattctgttgcacctaattgtaatttaatatcttcaagtgtatcacattgagttaaattaacatattgtgatgaagttaaaagtgtattcttataacctctaacaagaccttcaatatatccattatcgatattgaaaaacaatccctccatatttgtctaattgatttgattgtctaaaagaaatacaaaaaagaacaagtgataacaatcatagaagattagaaaaaagcagccaaattttatataccatgttgaaatttcatttcgagactttctttatactgtagtacttattattattattattattataacagaatacttgtagttttataaaggacaaatgtcaacacagcttctattggacaccttggttggtgattcacaggttagtaactttaactggataaatgatgatgaggggaaatctatggcattgtcagtattggatgaaatgcttaattcacctcatttagaatcattattagatacaacaattacaccaggtatgattgatccaggtaatacaattattgaacaaattgctgaattatctaatgaatcattaatgattgataaagagattgcattaagattatgtgggaaggataatagtatgaaagatttaaaattaatgattgatgcaaataatacttatattgaatcatttgaaacattagattcaattatatcatattgtgaagatatgattgaagaaaatccagttaacttcatggattaaggaaatacctgaatttaaataaaaatcaagaatcaaaaaatactagtcataatagtaataatgatgataatgtatctaagatattatacaatttagataatgttatacaaatattagaattaccatcaataacgaatacattaattaaatctgcaaattattcagaatgtatagaaatatcatcatttattcaaagattaagtataaggtataatgatttagagattatatcacatataaaggaaaatgtatcatatgagattaacgatatggttaaacgattgtcaaatttattaagtgggaatttaaaagcagagttcaattatgaaaataatgtcgtatttgaaaagaattatacctgataaatggaaattaaagacaattttcttaaatttaagatataaatttataattgatgaatttgatactttaataccattgaaaaattcaaaattagttgaaaaatatttgaaaagagttttagaagttttcagagaatttacatttcaaacagttataacatttgaatcaattttcgataaagatacagaaatgattcattcatttataatttcaattgttaattctctaattgatatacttgatgagaatttaataaacattaaggaggaatcaattgattccactatcttgcaactactctactgctctcaatcccttgcacgtgtaggaggagactttacatccatactactccaccgtctaccccatccactcaccagggaacagatactcaccactatggccaaacagagacaccttgtacgtactcttaatcattaggtaatcgttaataaatcctgtatagccataaagccataaaaagaaaaccttcgctgtgtttattttcacttaaactattatggaaacaattaaggctctgttttctataattaatgtcaccgccccttccttttagtttcacttctcaggggataatgatacaacctgttccgtcaattgatgtcagtggtgtctccgttaccacttcagagaaacaacaggttcataaaatggataatgaacatttagaacctccacttgaaaaaattaattcaaacgattccggtaattcaactcgttcatttaccgttgaacatgaatttattaaacctaatgaatatgaaattaatttcccctggaggaaagttggttcatttattgatccaaatgatgaagttgatgaatctcttttgaaagatttagccttggatgattcatctaaaaaaatttcaacttatatttatgaaaaatattatgcagatttctattggaattgttcattaattatatcttgttgtttcttttcttggttcatctcttttattggatttggtattttctcttacgttttcgtggctatttgtacatttgcagtctatcgtgctgaatttcgtagatttaatactaatattcgtgatgatttccaaagaattcaatcagttgaaaatttagaaaataaattagaatcaatggaatggttgaataatttcatggcaaaattttggattatttatatgcctgcattatctgatttagttattactaatactaatcaaactttagcaaatgttgaacctccaactccaattaaaaaagtttcattggatgaatttacaatgggtacaaaagctccaaaaattgattcaattcaatcttttactaaattaggtaaagatttatatcaaatggattggaaatttaattttactccaaatgatataagtgatatgactcaaaatgaattaaaaaataaaattgatccaaaagttgctttaggtattaaaattggtaaaggtttcgttggtgcttcattaccaatcttacttgaaaatatgtcaatgattggtaatttaagaattaaaattaaattaggtgaagttttccctcatattgatgttttatcagtttgctttatggaacctccaactattgattatgctttaaaacctgtaggtggtaatactttaggtattgatgttatgtcaattattcctggtttatcatcatttgttactaaattaattaattctaatttagaacctctgatgtattaccctaatacaattgatatcaaacctgcagatttccttcaacctgaatcagctgctggttgtttatttattaaaattagaggtgttgaatatatttcaaaagataatacaagtaacctttatgttaaatatggtccagaaaatgaattggataaaacttttacaactgatattaaatcaaatactgttgttcctgtctataatgaaactcaacatattttaattaataatttaaattctaaaatcaaatttgaattatttaatttaattaataatggtgatagtttatcaattggtgaatctttctttgaattacaagatttattacaagatccaagtatggaattaaatgaaagtaaaattattaaaaataataaaaatgttggtaaaattgtttatgatttaaaatggttctcagttttaaaacctgaaactttacctgatggtacattatcatcagaaattccagattcagatgttggtatcttaaatttaaatatcttatcagcaattgatcttgatctcactaaatctttaattggtaaattatcttcattcattgaaatttatctggataatcaattaattcaaacttcaagagttgttaaaggtactaatactcctgaatataatcttcaatttgaacatttaattccaacaaaatcaacatctttcattaaaattgttattaaagatacttcatcgtttgatgaatcaattattgcagaatatcaaggtaaaatacttgatttaattttaggtaatacatcatcagttaatgttaaagatcaacataaaaatgaacaagaaaaaaactttactgaaggtaaaggttcattcaaattttcaattacttggaaaccactcgatagttcaattactaaattaattacaggtaatgaagatacattatcatttacacctccaattggtgcagttaaaattgatttgaaaagttgtaaagatttacctaatttagaaaatttcggtaaaattgatccatatattaaaatttattcaggtggcgaagttaaaggtgttacaagtgttgaagaaaatacaacagatccagttttcaatgatgaatttttcatttcaatctattctaaaaatcaaatgattaaagttgaagttatggataaacaaaagaataaacaagatagacttattggtagcgattgatgttaaattagatgaattttttgaaaataaagaaaaacaaaacaaaattttcaaatttgataattgtcaattaagtaaaaatagagctaaagcaggtctaattaattatccaactttcttattatccattattaccaatctattcacataatgaattacagatgattgaaatgaagaagaaggaaattcatgaaaaatctgaagatttagatgaattagaggaacaagctaaatttttagaagattataaaaaacatcctgatgattatgaatgggttgatattgatgaagatgttaaagatgttgtaattgatgataaattagttgtttcattagatgacttaattaaagttaatagtggtgttattggtattaattttatttccggtaaattaaatgaaaaaactgcatttgtacaatttttcattgatgatcataatacatatgactttattacaagaaagagtaaaaatggtaaaattggttcatcatctggacaagttttcgttagagatttaaaacattcaattttaaatataatgattactaaaacaatggatgttaagcaacaatctgatgttttatatgaaacatcagactcatttaaattgattgaattattaatggcgggttatgataacgcaattgaaattgatttagatggtaataaattgaatgttttatttgaatacgtacctgttattgatcatgaatctaatttattcgatacatttgaagatacaggtttattaaaacttaatctgattggtgctaagaatttattatcagctgatactaatggtaaatctgatcctttcatacttggttatgttgatggtaaaaaagtattcaaaaccaaggtaaaaaagaaaacattaaatccagaatttgatgaaatttttacagttccaattagatcacgtaaacgtcaagaaattgaattaaaagtttacgattgggatatggcaggttcaaatgattatttaggttcaacaattattaaattaaatgataatgaagaagataaagttattgaaagtccattagaaactcaaggttcaattatttataaatatgattttacagttggttatataaaaccaaattcatcagttttaataccaattgaagaagattcaacattatcacaaactatgaatatgctgagctatgcaccaacagttggtgttgatgcagttggtaaggctggtaatttagctggtggtctggcttctaatgccgttggtggtgctacaggtattgtttctggtggtgtgactggtggtatgaataaaatttctgaaattgaaaacggtgcattgaaaaaactaattcataaagatggtgaagatgcaggttttggatcacatttaaaattaaaacctccaggatttttacataaatcaaggaaaagtattgatgaagacaaaacattaaagagtaaaaaatctatttctactatgaatgatgataatagatcaagacatttaagagttccatcatcaccgggtattaataataataataaaaatacttcatttgatgcacaatctcgtggtagaagttcaattgatgcagtaagtgtaaacactaatgcatttaatggtagcaattcaattactggacgtttaacaattattgaaatgaagggaataacaagtgttgaagatactgttttcattaaagttacaatggtttcatctaatggtacagagaaagttatctttaaaactagaaaatataagattaaggacggacatgttaaatggaatgaaaatgttttatttaaatgtgatacagagggtaaaattgtttttacattagctacacatcatacatttggtaaaggagatgaaattgcaagtggagaaattttactgcgtgatgtaagtggtattagggacaatgttgtaattaatatgaatattggtaatttaattgtcaattttaattatgcttaattgtattatcatgggtatattaaattatttaattatttatatagcaaaaagtcttttttttatatttacattagttttgataataaggtacattaatgttaacattatttggagtttaaatttgaatttgtgtttgagaatctactccttaatctacgacgacgaccattgacgataacccatttaggttgttgagaatcggtactagtttcaagaatattcttatgagtgttcctccttagtgctgattattgtttttaagtcatcacctttagtttcattattagtgtgatgattatgattatgggtatgatgagatatatgctttattttctttgaatcattatgtaattctttattacttagtttcatcgcttgattcagtatcttcaatttcatgatcactattccaaggatcatctatttgtgctttcaaaaattcatcatctatctctgtaacaatatcatctcccttttgatgattatgatgatttaagttatcttctataatactgttcccctttattataacgggtcttgaatcatgtttacgtgcaattctattatcagcttgtacatcacgaggatgtttagagtaaatatagttatgtaaagccatgatattaacttatcaataagggggtagccctgttatttaattagaatatacgaatatacattttaaatttatatgctacaaattcatagaataaagtttgtgaaaagttgggagttacttaatgcttatatttaactttgaattgttaaaggacaatgcaatagcttttaggttgaaatggtgccattgaatataatttctgccgaatgcggaaatcacaccattttgcaaataaaaaatatattcatcaaatcattcatcaatttattatttaggtaatttccatcggatattagctaatcaatttcatcaattcattattcattaatttcaatttcaccgtttagtccactgatggacggttttattgtaatcacgttctccttatcttctagtattacattaccactcccgctggttgataatggctgtttattaccattattggtattattggaatttagtgttgatgtagaattattattggaatttgaatttgagctgtttgtagccattttatttcgtagtttcagagaatttagtgaattacttttagcattcgtttgtcgtattttgtaaattgaatataatggtgagaatgagtgtgcgaaagtatgaatcacgttttatatccagtgatttacagaaacattgaaacattgagtgttttggacaataaaatttacgcagtaaatcaatcttaaacatttcaatctcttgatttgatatattaaaagtttcatcttcatctccatcttcatcatcttcttcctctgatgttgaaaatggttcattataatcactctcttcctcttcataaatatcatgaagacttttacgttcattagtatgatctgagaaactttcccggcttgaactctcactagctgctttgttgaataaattaaatgttgatggtgtgagccttttaatatgttttctttctggtattacttttctttcttcaataatgttaacatcaggtgttaaattcatattatagacacaatttaatgatgatgttgatgggaaattttgaacattattaaaagttcttggtacatctaaataatcatcaaaatctttatcttcatcaaaatctaattcatcatctccaaaaacatcagaaatgtcagatgcatcaaaatcgagtctttcaacctctccttgattgtaatcagtagaataatcaattgaattattaccatcaataaaatcacaatcttgttcatcatcactacgtaaattattttgagaagttacaaatggttgaagtctattaatcttatgtgcatgtgttgatacacttcgttgactgaatattggtttaccagtactatttgatttcctcatttccatagttgatacactcttcattatatgttttaaagcttgttgagcattcttgatattatgagaatctgagaatgaaatattagaatttgaaccggatcctgatcctgaacttgatccattcttagcctgtggtgttaaatatcctataaatgataaaagtttttcacattgtaattttagtgaaacaatttcaaattcatggtttttaatctctaattcatatttttgcttcaatacagataattctgcctctctgtatgccttatttaaactattatttcttaaactcgatattcttgaacttgttgatgaattacgtgacgatactcttttctttttaatgtttaacttcccagtttgagattctccctcataatcaaaatcatcatatccttcctcgtcgtcttcttcacctagattactttgtgatatcaaaaaatcatttagctaattcatcatattcaagttgtagtgattggaatttttcatcaacttctaaatatcttgctctcatcatttctaattcttccataatcatcagctttgattgaacttcaagttcagtttcctttattaatactacatttttctttttcaatttagttatttcagttttagctaactgtaaattctcataaagttgtgagatttgatcatcattgttatcaaaactaagtattttcccactcacatttaactgtttttcaagtctatgtatcttcagttccaatgttgtcttcaaatctatccaatcttcaaaattctgttcattctcagtacgttcattatttattaaactcagtaatttattattatcatgcattaaatcatttatctttctagttttaaagtcaattaatttatccttctctaaaagttctctattaagtgattctaattcagttattagatctttatttatgattgttaaatcttgtatacgttttgcattatcagttgaaattggtgtaatttcattcattggagattgaggtaaaaatgatatacttataggacttgtattctttttcctcggagatgccttaggactcgaatgaatcttgaacggttgcatcttgtccttgattttagagaagaaatcaaataaggaattcacttatttacatattaaaattacatgtaagcattacaaaatctaaccacctaaaaaatctcgttatcctaaaagggtaatatgtaaacaaaaaaaataatgttggctatttctttaataaagatctattacgtacaagagtacaggtactgatagtgtagacattagcctgtatgggaatggtaactcctctactgtgtagttccagttatgttcagttattgaattttcaaatgtttgtagggtattaatattacgtcgtgttgctgcgagtaaaacacgtttagcaccactttgaacaaaagtttccactaatgatgggataactgaactatcatatgtcacatcggctgctagtatagtatctacttgtggaactggatctgttccccaaaataatgtttggaaaacaacattggcgttatttggtagattaagattataattattttcagctatattaacaacattttcatcaccatctgtaataaagagatgattatttgttaaaaatgatttattcttcattatcattgcaatggaaaccataccagttccacaacctaattctaaaacattacctttaatatcaatattctgtaaatattcactcaatgctaatgcagcttcccatgttctattacctgttgttccaccactagctataactgatggacattctttcatatgaatcaaatgatcacctatagtgtaaataacggtatcgatagatgtaggagaaagtggtacagatgctatccattcactcaaatattcatagtattcatcagatgctgttggccatatgttaagtagtttctgtagaatctgtgaagcataatatgggttagatttcgatattaacactagtttcttaaggaaatcgttttgttcctcctcagtgacatctttcactccttcaaatggtaacgaatagagttgaactcgttgtaatgcccttgcagtgaagacgtccattgaagaactaagttgaagaatcggtgttataaaaaattttgttcatagaatttcggatataaagaggtttagatagagtacttacagtagttatatacaatatacctacaatacttacaatacttaattgctacatttaccccaacatctcaaacgtttgacaccaccatctggaatcataacaagcttgacatgtgtaaatgtatttgcattggaaactgggtaatcatgttcagcatctggaccagttttacttttatcaacaattacttcccaatttaaatcatcaaatgatggatcaacatcactcttaattgcttcaactttaataaattgtgggaaattacctctataatgagcagtatcaatagaaattttttcaattattgcagaatgacctaatctaataattgcccaatcaacatgaccaggagcacgagatctctttgtttcccaaccatctgacatatcatgaccacgacctggtaataataaattatcagctgaaccaaaatgttgatcagagaatgaagttgcaacaccaccattaatagcacttgctaaatcaattatagtatttgaatcatttggtaaaattggtataacttcaccatataatctaaatctagcaataccaccatctgggtacatctttaatctaatatttgtataagcatccttggtaatttcatcacgaataaagaaatgtttttgtgatggaccacattccatctttggaataatttcaacccattcaccatcttcaccaattgatgcatcaactgaaatatgaggtgcatgattaccattgaaaaatgctgtatcaacttcacaaccaataagttttgcagatgaaactcccatacgaaaggtaacccaatcatattcttcagtattatgtctacgagtttcccatccatcataccaagcacctgcaaacacaaatttagttgcatctctaattggtgcctttggtttaattaaattctctgcagctgcaaaccattcatcactgaatgataaaactttaccaccaagcttttcaccaataacatcagtgtaatgacttacaactttttcatgaaattcctctgcacttacttgtttaaccatttcgttatccaatgaagcagatcaaaagaaaaccatcatataaacacacaactggcagatccattcacttttatattcacccagtaaagaaaccgttaataccacacaacccactcggcggcccgaaagttttcacgggtttccccgataacaacttttacaatcctttttactctacttatctacttttctataaagaatctctgtatctgtctctcattaaggtcaacatctctctctacgtagatgatctcgtcttgatcagtaaccattaccagggtttgtgttcttgttccataccctggtccgttttcattaactaatgctggaacaaaaatggtttcctgtacagtatttgaaccatttccatctaaaacactatacaattcaccaccttcaatagtttgatgtgataaaatatcaattagtgcattaatcaactcattttcattaggtactacaccattacatttatcagcataatcagttagtaatttttcacccagtttaacctttggccacggattcataactgctgagttggataatccaacagatttcctaccatctttaaatggatcatataatccttcatgtctattagagaatatgaacatattagtatcctttgataaatctccaacaatcagtgaaaatccaccgacatctttaaaattattagtttttttcttttcaccttcaatccatgtaactatatcatcattgttttcattaaataagaaatcaactggtattgcacctcttgatactaatccactaaatggaccattctccctgtaattaactaatacacaaaaacgtcctcttttagtaataccaatccatgtaccgtttcgtactaaatctctaggcatcaaaactttatcatcgacaaattgtgcttttgccgtaggtcgactaaggaattcgtccctatttgatgccagaactaatttgtagcctggtatacttttagtgcataacaaaatacacattccggaatgctaaatagtattatatttacagtaataatgatataaatgaataaagaagttgtctataaaatgactcctattaatgtgaaatttgaaaaaaaaatgtggggttgaaaaaccacccatgaagacttcaccaaataactctttcaacgacttcagaaccatatttgaaagtatacttcaagaatgaaatatagataaactgtgtccacatccataaccatattccttcacctgtatatctgatttcagtgttgtaggtatgtaatatattaattggtaaaactggttcactaatagtggaaacaaataatctgaaaaaaatcattggcacaatgtaatatctcaaatcaaacattggtgttaacataactgaaatacttaaacaaatcataaaactgtagaaaatcaatggtgatgcagctgtacgtttgtttggtgtattgttatcataattattcttgaataatttccaaataatgtaaaatgaaaaatgataaactggtattaattgtaatcttgccttttcctccctgacaattaataatctgataaagtaaaatacataatgacgattatctgataacattgatggatggataattgtgaaattttcaataactatgtataaaattggaatccaagcagcattaaacattaatccactaattgaaaataaattatcattgacatagtcaacaaaagttcttgaagatatccaaattggaatagtaaatatcattataaatgtaacacagtaacaaatttgtgctaaatgaggaacaattatttgattttccttatcacctaaagcaactccgccattttgatatacaaatgtgaaaaatgcaacaccaacaatgataaatgggattaaagtagttagatttgctaatccagtcttgataaatgtaagggtatcaccgataccttctccatatttatatttctttccatctttaacaattgaatcgataataacagcacccataaagaaaacccaaacaatattgctttgcttgaatgtaactgataaggatcctaaaattgcagacattattgcacttaaaatataactatttttcggtttccaaacaataactgcatatgctgcaactataaatacagatgcccatacatctgggtagaataatgagtagtaaattgcaattaatgggttcagtaaaatagatactgccgagaatcccgcctctttattcttgaatctgattaacatcaccaacattgccaataaaactccacctaagaaattgaaatatctcatattagacaacgttatttcagaattggaaatcttagcatataataaacttaaatagtataatcctggtggagttgaaattttatcattccatgttgtataatcaccacttgcaattgtttttaattgtgggaaatgtaatttttcatccataactgggtttttaacatcattggaaacatcttcaacaaattgacgtaatggcaatgttgcaattcctgcaactacggtatctaaaagtgtttctgcaaacattgtctaagaaaaatgggaagaaaactaccattagaaacttagaaaaagacatcaacatgatttatacgtgtagactaaaataattttatttgacggaagaatgtgcatgcttcaaatcacttgtttccgtcttttaaatggacaatccaaaccaataatgatattgtccttctggttaatcttctggtacttctgttccacaggatgtgccattactataactgcagaaaattctgaagtttgggatgaatttaccaagtactctcagcttaaatcctggccttatttatcaagagctagagccgctgcaataaggacacaaagggatgttacagctaatgtttcagttgcctacagtgtgactccaggagttgatttaacaccagtggtttttgaaagtctgggttataatgcagattcattgaatgatttccgaacattattaaatgttggtgttcagacatttatcttagatttatactatcatgaaaattcaaaagcttggcttttatgtccacctgaaagacttgaaagtataattggaggtggttatacatctgattacgacttcactgaatgtgatgctgcaacatttaatcttacgtcccttataagtacactgaataattttctgagtaatacaaacaacaacttaaatacaaatgtcatgtttttattattgaaactacattccttttcaacagctccaaatgttacaatgccagcgtccttggtaaacaccaatgttacttcattatcagctcaattcgatactatcgataagattgtttcaccacttaccgttcctagttttaatcttccaacaatgaacgatcttttattccgtttaggtttacgtgttttccctattattttagaaaataatttgtatgataacacatcatataacttacttgacgatcaatttacattttacatatcgttgagatcagaaaagacggatcaatgggattcatataatatcctggatatggatgtttaccatattgatgaatttgaaaatgcaacaactataccacttagaactcaacatcttgcatttgcatatgatacttcagcaagacctttttcactgaaaagttgtagaaaaagtatatcgcttggttatggaccaataatatcacatgcgttagataacctctctgatatctcatggtttttggaactgtcgtgttggtcatggtccccgtatcagccaacaagtacggatattgatgaattacaaattccacaaatagtttcaaacatttcagattatattttaaatgcaccattcacagggcgcatatttcaacatagcgatatgtttgacaattcatcactgaactttatagatagtggcgctaacaataatactgatgacaacaataacgaaaacaacgatgataataatgaagacgatgaatatttaaacagatgtgcagcattatctaaaatcggatggattgcaacaacatgtgatcgtaaattaccggttgtttgtcaaaacttgagaaatgcatcagatttcatgctactcgatgttgaaatggattatatgcgtgcagtatctgcatgtaaggcgatggatggaagatatgatattggtgtaccgagaaatgtttatgaacaaataacggcaatgaatttaataccggaagataaagaatttgtttggattaatttgaactctttagctagtgaaaattgttgggtggtaggtttgaaataccaattgtccgtatcaattagttacatctactcatgtttttgtcaaaatgattacaccaagtactacaatggccgtagctttagcagtagctctgatcattcttcaatcccagagagtacctgttcataaaaatagaagagcttggaagcgtaggatcgatgaattttcaaaaaacgatattgatggtgttccagcttgaagagagagggagagatagtaagcttataaaaagaaatatatacccataaaactatctaattgtatctatggatttatctacaccttctgtagcttcgattatttcactaccgtaaatacctttctcataaactcccattttcatatccaattttgaattccaaacattataaattctaacactttgatcacttattgatgtacagattgaactgaaatcatttgatatatcagctgttaaaattctcatatctggtggtgcagtgactttaatttttaacttcattgatgggtatgaataaactgataaaatatcatttttttcattatgatcaccaaatccaaaagttactaaaatttccttcttggatcttgaccaaataacagctgtgatttgtcctttagttttaaatttactaatcaatgttcctgattttgaatgccaaaatcttatatgcttatcacgacttccgcctccagtggctaataagttaggcatccatggacaaaatgcaactgctttaactgctgcttcatgttttaaatgaaacatttttttaggttttaacatatcagaaatatcccaaatgctaccacaattattgttagcacctattgctagctgttttcccttgaagtcaacatcaataccacatatttgttgttgatcgcattgaaatgtaactttaggtttgatagaataaacagtttttgtaatcttagtctttgatggacctttatattttatatcttctcttgatgataatttaaataatgtaacttgaccaacatcatttcctataaagaaaaaatgcgtattaggtatccatttcattgaacaaatgctggaatcatttttcattgaatacttagcaataactgtcgccgtatccggtttgtagataaacacatcacttacctttgtaccaactgccaaaaaatcatcactactaaaacacaaagcagatataatttgtgatccaatatgttgtaatggaattgtacctcttttttcactccaacaataaactgtgcttcctaatccagcagctattatatctgatttatttgaccagcaaactaaatttgagtaaaagtcgttccttaaacctggtgcatcgagaactttaaatggaatttcaggtacacaagtctttttggaagatactgggaaattatcattaaactttgaatcaaaatcttctgatccgcttttattattacatgaaaaactatgttcactatcattcatgtgagagtaaaatggtttcatctttgtggggcttctaaaaggtttaaagtttaatattttacttgaatcgatacccaaagctttggcaacagttgtttgatgatcagaacttgaatcgattgtatcagtattactcactcgattactcgcattactatttgcattatctattaaatcagtcagactggtatcattatcatccacatcattcactatcaaaattaaggttatttgaacttattgatgagagatgatcaaaatcgctaatagatagttcgcatccggttatagtcaattgttgtaacaattggaatgtttgttctaacgggtgaccccgatggacttttcaacgactgatcgtgataattgtacatttttttctcagaacttgcatttattgcaggtatatacctgtcatttactgcaccatatgtagatgtgttgtttgataatatagtttcagctgagaaacgatttcgtgacttttgacaattttgtcttttagtcttgtggtgatgcctagttgatgacattaaaaaattcgtattaaattatataaaaaaagctgttattagcaaagaaagaggggagaggaaataatctggctatttaatgtatactgtagatgtatcctctacacaggttgttaaatagaagatgaaacaaagtggattaaggattagggattaaggaaaatgcatgaatgctaccaacttcggagttgccttaataggggaacgagaaaactccgaaaaaaaaatctttccaattttcttcaatttcttttaaacgatgaaactttcttcatggaaactgaaaccacaatcattggcccataatctgacattatcaacaagacctgaaggacctgcaccaataacgtaaatttcttcatctggttcaccattattattttgaaatctcgcttctctgttggctataaacctatcatcagaatataattcagtaacttgaccatcatctaccagataagaaattgtttcaccacttttaagagtaattagtggacatttacatgatgagccaatacaccaactataataatacagacctaaaactggtctaccaaattcaattcttgagtttgagtttttcaaaacccaataatcttctaaatcatcgtataatgcagatgatgcaattgttggagcatatgaacctaaaagtttttgattaatcgttgataatcctgaaagtttcttagattgtgtccttgaaggtgcagattttggttgaatatcaggttcgataattgtaacgttcaagttttgaggttctgaaactgtatgtcttggtgatctactgattataggaactgggttttgattttcatcaaaaactatatcattatttccataatgagtttcaacaccggcggaaggacctgatgcattctgttcaggaatagttggatgtgattttttataaatttcatcttcatgtaattcgatatcaatagtttctgtataatatgaatttgatgatgctttacctgaatctcttaattgaacaagactctttttatgttttgggtataatttagaatcatctaaagttgaagatccataagtaacattcatattattcgaattattaagtggggttgattcatctgtactagctgagttaaatttgaatgtcgttgttggagatagggaattattgcttgaagatacatcaaatgaatctttatcatcactgtgattattattattatatgaaaaattaccacttaaaatttccatttcatgttttaattccagttctcgtttcctagaatgtaattcattcaatgcatctctaaaattagctttttcagaaatagtataatgacctgtaatgaaaatatcgatacaatcatcattaactaaatactttttaaaataatctaaaatttttaaatcatcatgatctctaataacccaaataattttgaccattgaaccattataatttaaaactcttaaaataggtaaagcaaaactgattgcagagccacctactacaatcaaacattttttcacttttgtattcactgataatgggttgttactatttaataaattactcattgataaatggttaccattattattattgtgactaatttttttgataaatgataagtgaggcatgtatgaacccgttatcaaatattttgaattatttttaaatttataattaccaactctaataattaatttttgtgatttatcaacagataatgttgcaagggtataaggatgttgaattggaaaaattaagtaccataggtaatttaaaaatttaggtaatttatcgttataatcaataattcttaaatgacaaccaggtaaagtatttttttcaaccaatgaatcgtttggtaaatccaaaataatcatattttttgaaattttaatagttgatattgttgaaactgatgatattttaaatttataataaatctgatataacaaaatgagacagtttaaagttgttaaatatggaatacctggtctaacatgtaaatataaagtaagtgtaacaatccaagtacaaatataatgattaataaagaatattttgtaaaaagttcttctaatataaggtaatgaagtaagaactatgatgatgaaagctgtcattgcaataataccatttaaattatcaaatctgtgtaacttgaaaagagtttcatttttactcatgatgtaaatataaagtaatgtatgtaaaagactttgtaacacgaccaatcttgataaccatttatgaattggtaatagagataagtataaaacatcgggtaatggtgaaggtcttaaagttaatatcaatactgttggcaaacaataaactggtactctacctaatcttgcagcaatgaatcttatatcaccattagtttgagcaattgataatattgagagtataattgaccaaaaaattatcatttgagttgacattggattccaacgtaacagttgtgtttcaggattttgtttgatccatttattaaatttaaggaatttataataaatataatttgatattctattccattttggtaatatcaataagaatataatggtaattatgaaagttacataaccataaaagaccgttatttcacgtctattaattttccatgatggtgaaaaaatctcaattatcatatttaaagttgaacctatattggagtcggaattcaagtcgggatcaagtgggatattattcccattattggtatcgatatgcatttgatttattggttatttaataacaaagctgaaagaaagatacgaggtgtattagaaaatgaagtatacgtgaaataaatcaagaatttaaaaaatggatatgaaacgaaattataacaaatatacaccaaggaattggctataagagttgatgagatattactaattaatgacaattagtaataatattatgtacctttgaattaaatttacaaaagatatattgttctaactgatggattaaagagccgtgtatctataggatacaattgatcataaacaatcctgtaaaacccaaattatttcaatgatatcacctcaggtggataaaaagtcaatcttgcccgttaccgatatctccaaattgaaaaaattaaaaaattgaaaattgaaaattaaaaacgtttttgtcacgtgtattccactgggtctctctaattttcctggccagcccttattgcctcatagggcaccttacgtaaggcacaaaaataaaattcatcaaaagccaggaacattgaaaaattccacaaaaacggggaaaatcttccacccgcgcgtctccttcccaaaagagccaccccctcagaccgcgcagttgcaaattttttgaaatttttcataatcttaacactgtgagttgtacggtattgcaaatcattggtatgggaatactagtgaaaattattttcaatttcaaattattgtcaaaataactgatattttactcaatttttattgattaatttttggaaatcttttaattttataaggcaaacaggatatatctatcaccacactcatcatggctgacttctccttaactcaacaagatttacaactcttgattgctgctaatgcacatcttggttcaaagaacactaacgtatgtacctaaattaatatgaaataattaagaaaaaatttaaatcattcattaaatgatataaatggtctatatttgatatatgatatatggtatatttgataaattatgaaatgaattattaattgataaattactactgtcaagggacgattattatattatcaaaaaaaaatgaagattatatctgaaatagcatttataatacaatcaatcataatttaatcatctttagtcattaatatcataatattaagaaatagattataagttatatcatcaaagaaaaactttacatgaattgaaatactaacattaaaactctttattttactttttactttttattataggttcaccaaactgcatacgtctacaaaaccagaccagatggtgttaacatcattaacgtcaacaaaacctgggaaaaaattgttttagctgcaagagttattgctgctatcccaaacccatctgatgttgttgcaatctcttcaagaactttaggtcaaagagctgttttaaaattcgcttcccatactggtgcaaccgctgttgcaggtagattcactccaggttctttcaccaattatagtactaaatctttcaaagaaccaagattaattattgttactgatccaagaactgatgcacaagcaattaaagaatcttcttatgttaatattccagttattgctttatgtgatgttgattcaccagctgatttcgttgatgttgcaattccatgtaacaacaaaggtaaacactcaattggtttaatttggtggttattagcaagagaagtccttagattaagaggtactcttgcaaacagaactgaagaatggtcaattatgccagatctttacttctacagagatccagaggagccaactgttgaagcaactgaagaagaaactactgaagttgcagaagaagctgaaccagctgctgaatggaccgctgaaggtgatgctcaagattgggctgaagaaggtgctgattccaaggattgggctgctgaaggtgctgaagctgctccatcatggtaagtttgtaaatttttctacaagttataactaaatttgtataaactcttcatttttcaaagtattatatctttataaaaatattaatcataaattaaaaaatttaaattttatcctattaatattaccttcttcctcttttttatctaatgtattcttggatatatacatgacaagttggtatataccctttttatcaagacacggtggttacttgattgctgcattggtatatttttactataataattattatcaacataatttatctccagccacatcacctgaatcaagtttattttttagattattacttggcactttttgtttatcaataccatactacgaattgtgtcaattaatcaataccttatttaaatacagcttaccggaagatcgattacaattaccaacattagaagtacatagaagagattcaataactatcgatcacaacacttatgaatcataataattataataataagaacaatcaaatttcaaaatctaaaaacaatataattttttggccaaatgatataaaacttaataatgcttcagaaagatatctgatattgggttatagaattgatcaattcaccgtggttgtcattgatatcattgtaaaggaggactatcgtgaaattagtaataaaactgacaaggacatttttcgtaatattgaaattttaacaagtatcaattgcaaaataaggaagtgtcatcaacagtctcataatcatttatatgaagttcaatatgattttgtgaagaatcaaccaatactaaacaataatcaaacaattatattttttaaaccaccaaattcatcaaatttagaatacttttcattagaccctatcaaaattaatattttttggaacaataataatcaaattggtgaactcattttcagacgaccatcaaccaggaaatatgctgataagctattgaagcatttttctaattttgataatgatgatgatgataatttgtcacttattggtgaaaattcaagggaaattctacgaataataaatttgactaattatatcagagttagaattaatgcaaacagattaaacaggggtaatatcttcaacacctttaattgttgtataccttattatgaagtgatgtttaacttagtagcaatgttctattacattttcattcagaaaacgtgttatttattaagttcaatactgacataccccgttttaaaattaaacttcaaatataaagtatcaaatgatggaaaatcaaccgataagaacaaaacaaacatatctttaagctcgttatcattcatgattcatcaaataaacttcagagctaaacaactttacaatttaccattacaattcaagaaattaagatatagcaaacttgagagtgaagcttcaatcataaaggacgcaaaattttccccgagtgaatatatcaagttttacaatacagtttggttgattatgaatgatttattactgggtgttgtgttcacaacaatattgaaaaaccaccatcacactatattaagagtttttgaaaaaattgtggtggaatatcatgtattgttaagtaataccattacatggttgatgaattcacctgcaggtttcaaattgaataatgaacttgcatcattcatggggcaattaattctttgggtgcttgacttctggaaacaaaatattttgaagttcctgatttcaaattctgataatatattgatcacaatagagattttttcacaatattttggactctctataggaatttcaatgatattagatttattcaacatattcatcttgagtataaatggcttttacattgcatcaactagaatatattgttggcaactgaatattcttagatcattattcaaattattttacgggaaaaaatataatgttttaagaaatcgtgtagattcaaaagattacgagtttgatcaattgatgcttgggatcatcattttcacaattttaatttatttattgccaactgtttttcatattctatcttacattcatcatagcaagacttacaattctgatactcaattttactctcaaattactactcatatcattgaatcacttaccaattgtggcattccttttaaaattgaagaatcaagatagattgcctggtggtattgtacttgattgtgaattttatactaatgattatagaattacacttcattcaaaatcattatcaatcggtgaaattgtaacatcacacatcaactcgatgttaaatttcaataagttcaatcttaatgctcaagatactaaatcctttgttgaaaatcttagagctgataaaatcagtgagttatatactattgacgatgttgttaataattgggatagaatttcaattgtgcactattgtgaaaaatgtagtgataggtgagataatcaaagattacgattacaaggaaatgttttaaataggttctttttgtatttggttctatatagacgactatattcattattcacagttaatttatatacatggcgatcatttcttcttcttctttgcagcactaggagcttctctaatcttctttggagaacctttacctcttctcttaagatcttcaactctctctgcacgatattgttctggttcattaataacatcgtagaatggtgtagataatgcctttgctgcctttgcaatggatgggaagtcagatggtccgtaatagttacctaatgtttgacccttaagtggagctgtaaggatttttgaacctgttctcattttagttgggttgaaagttgttctgaaaactctgctttgaatttcttggagttccaaaagcttttgcttggatggcggtacaagtttaatcaataccttagcaactgtggacatgtttggctctgtaaatcaactatattggaaggaaagtacgatccatcctaaggttgaattctcgagatttggaaaatcatttttttttactgcaacatgttttttcatgctgacacattaataaacggtttctcttcaactgttccttctatttttattctataaaagacatatatagatcataccaaccattatatttttagattagatagtatgatatcatgaaggttaataaagatgttttacaaatggcatcatttgttaacgatttgacaaatttcataccattgggtgtatgttttgcacttcatgataagtgttttgaaggaccaggatgttcatcccctgatggcgatggatggaaatggcttgatttcccatatattgaaattgatggtacttcagaaatttttaaagctttgagatttatggtaagaagagtgctttgtcgatttacttatttaattcttgatgattttcctgggattgcattaatcagagtttacgttcttcccgaagatagttactataaagaacaaattgagttgtataggaaacgttattttacattcaaaaagccttctgcgtggttagagaaacaggctaagatgctcatgggtaatttgtattccctgatggattacagcaatgaagctttcaatattcaaaattcagatcaattgaaaacttatttagagtctaacagtactgtgatattaaaaatgttttctaatactcagccattgacgaacatatcttctggaagtatgaatttccatctaaacaggttggtgagtaaaaaaccatacgaacattataaagagcagaaatctcttaacatgcaagaaagattgaaaaatgtttatgctaatataaaatcacctcaaaatatacgctccaatgttatcaatgaagatgatcttgatatatacgacatgatcaataataatgaaatatcagggtttaaaagtgaattgtataatttccaaaaaagatcagttctgaaaatgtttgaaagagaattgtcacaatcatttatattgatgccaaatattgttgaagtgaaaaatcatgaaaccacttattatatcaacacaactacattactgccacaagtaaacccggtaacttatttgccacctaggggtgggatattagcagagaatatgggttttggtaaaacttgtatttgtttggcgttgatatgtatctctagatttcaaatatcagaaactccgtatgactataaaagcaaaagaaattcaaatagaaaggtgaagtctttgtttgacacttgcatagatttcatctccactaactccatcccgtggaaacaatactatgatgattttcctcctcgtatcacggcaaaactggaattggttgcaggttattttgagaaagctgaaattaaaccaaaacaaggaagagctacaagattcaacaatagcaatcaaaatactccactgaaaaaattatacttatcatcttccacgttggttgttttacctgataatctattttatcaatggagagttgaaattataaaacatgttgagaaagattttttatcagtgcttgctatacaaaatacaactcaaatgaatgaaataaaaggtattaatgaaattttgaataaggatcttgttttgatttctaatggtgcattttctaaacaatatgatacttcagactcaataattaaatcaatctactggaaaagattgattattgatgaagggcattcaatgaattctaaaatttcaagagctgttttgttaacaaaaggactgatgtatgaaagaatgtggattataagtgggacacctacatcaggcttaacaaatttacatcttgaaaccgaagcatcaaatccaaatgacgatcaggatttagagtattctatccaaaccaaatttgatcctaaaaaagatttgagtaatttaggaatgatagtaaagaatttcttcaagataagtccatggagctcgaatgatagattgtggactgaatcaattataaagccatttgaacgtgatgagtttatgatagagtatcaactcttaaacctgttagaacgacttatggtacggcacacaatagctgatgtggaaaatgacattaagttaccaaaactacatcataagcctatttttttgaagccctcattttatgataaattatcaattaacttatttatatccgttcttgcaactaatgcaattacttcagaaagaaagggtgttgattatatgtttgatcctgtaaataagtcagatctcaagcgtttagtaactaatttacaaaagggtacattttattggactggttttagtatcagcgatgttgaaaatgttttgaatatttgtgtttattctttaaaggaaaataaatcaagatactctgcggaagatatcaaaattttaaatcaatccatctttgtttgcaagctggcattatcaaacctgagatggagatctgtttcagcagttcatgagatgggatattttgttaagaatctacctagttcaatagttaaaagttattcactgataagctatgaaggagatatatcagtttttggatatcctcatttgatctcgattcaaaaaaattattacaaaaacagaattataaaaaactcagatgatttgaatagtaaatttctgagtgatgttgataagttttggaatagttattggaaaaatatcaaaactgctaaaaagactgaaggtaataaaaggaaaattgcagaagattataaagaatttgaactttctgatgtcaaatctatttttgaaactgcgaaatgggtggatacattcaatccaaaacttgaagaaagccttatatatgaaaatgattcaactgaacctgttacatccatgctggtggatactcattttgttgaacaaatcgataatgaaaattttagaactattggatcaaaaatgagaaatgcatcaattgttggaactttatcatctaaactaaattatttaactatgagattactggagaatgaaacaaacggtttgaaaagtatagtgttttatgaatttgaaaattctgcatattatttaactgaactgatggatttgcttggtatgaattatttgatgtattcttcttatgtcaaaatcatggatagatccaatcatttagcacaatttgatagatgggatccaattaaaaatgaaggtgaagggattacattaataatggacgttaaacttgcatcccatggtttgactattattgcagcaacgcatgtttttttcattaatcctgtttggaatcaatcagttgaagctcaagctatcaaaagatcacatagaattggacaaatgaatgaagtttttgttgaaacgcttattttagaaaatacattagaagaaagaatgtataatatgagaaatttaaatagtgattctgataaagttgatttaagtgatcataaagatattaaagattattttttgacgtttccatttctaagaatattcaaagattctaaaatagatgagtattctgcatttgaggtgccgactatctttcaaaatgaatttaataagaaaaaaataagttcaaaagaaagtgatgatggtgttaagctaaggaagattgattcagtttataactcaaatgatggtacaagaagttgggatttacccttattttctgaaaagaatttagaaaagcttgctaataatgaaaatataaggaagaggaaaacggtttgatgatatagaagaaattcaaaatgagtataatactattgataatgataaagatacagttattctcttggaaaagttgagaaataaacgtgttcatagacatagagtaaaatttgatgtttaaataatggaatctataattttatagtattagatcaagttaaaaataatacagtaatttaatcaaaataaagaatgggaaatagatatctcccacgacacatttttatgtcatacttgcaaataaaatagttatctaataagttctctccagctttaagtattgtaaatcatgtgtatttttgtttattaaacaagaaaccattaattatttctactcttgttacagttattgcaataatattagtttattgtagtatttaaaccttaaaaaaggtaaacctgttttcttgctgagcctccaaaaaagtaaaattcttcaatttcagataatgacaattaactcaaattaaaaacatcaatagtaataatccttaaatgttgttaattttttaaaataaatgcaaaaagtactgaatacaacaagtaacatagttaaagtctattgttattattttttacataaaagaaaatataatatagtgtacataggaaagatttaatacttatttttctttacctgtcgataaatcccttaagatgacagatccgtctgctgaacaggttactaactggctatttatttcagaataatctaaatcaaatacagttgataaatgaccatctaatttatttattaattttcttgaagcaaattcccaaacataggtatatccatcattagaacctgataaaacattaaataaatcagattcatcatcatcatttgttggatctggtattattatcgatctaattaaccagtcatcatctgaggccgatgtaccatcaaaaacataaggctttgcacgtcgccttgcagttgttttttctgaaagtattctagcatcaaaatatttaattgtcccatcaatcgacttacttaacaaatatgattcatcaggtgataatgataatgatgtgacgttattagtatgtgaattagattctgaccatgaaacaactggtgattttgcattacgaatatcgtaacaatatactgtcgggtctatacctgcaaaatatattctatttgaatttctatcaatacaacacgtcaatacaggcgtatcaatattaagaggtgtatttatctcagaaatagggaattttgatctaacatcccataaccttaccttcccatcatcacaacatgttacaattgtatcattttcagataaagacaattgattgacagattccttgtgatggaaagttttcactttagttgatttattaagatcataaataattgctgtatgatcagcagaagatatgaaaacatgtgaatcttctaaatttgaccatctcaaactagttatagcagaatttgtaaccctttcttcatagacaccattatctaaatcatcattactattttcctccgcttcatcttcattatcagccaattgatctacattccatattcttaaacatttgtctacaccaccagatgcaaaatatgaaccatcttcattaaacctaattgcatagataggtccagaatttgtatccaatcgtaaatcacctgtagctgacatcgaaaccaacgtatcttcctaaattctcaatcaaaataaacttacagttgtcttatcctgtaaaagatcgaattcatgttgacaaaaattacccaattgggaaatctgccaattaaagggacgggtaccccataaatttttctaattgcgagggtggcaataattgaaatcggaagatgacatgaatataggagtgggtagcatcaagaagggaaggttttgaattatattattttactttcaattaccatattcacaaatcaattacacaatgtttgctagaagagctttaactgcagtcccaagaagaattgtccaagtcagatcatactctgaaggtgcaactggttcaaccagatctgatggttcatccgattcattcactaagagagaaaaggctcaagaagatttctacatcaagaaacaccaagctgaacaaattgctgctttaaaggaacaattagcaaagcaaaaggaacaattagaaaacttagaaaaaaatctgaacaaataaatttgatgtaaattaatttaaatttataatcaaatcaaattcaattccttattctaatcttaattcctatgcatgaaaacatttatttatttattccaattctaacttatatactcgattatttgcatattcatcatatgtcaattaactttatttttgtataattgagtgttttaataacgatttaacttatttattttaaaattttgatgatgtattaaacaattggaaaatattttacagtaaagtaaggaaatgtagatattatattagtgataatattatgtaggtgactaactacttatattatacatacgatgacagaataattttaattaacctaatttaaacgaggtcttttaacattgtctaataaagcactttcttcatcaattgcagggccttcagttgcaccaatttgaggagttgaaacatctgcatgataatctttaataattgaatcaacatcatcaatatttaaaggtctaatatcacctaattttttaattttaccagtaacttccttaatttgatcatcagttaattgtaaatttaattgttcaactctagctttgattgcattccaaccagttaatctattagcaaaatgaatatatcttgttaaaccaaaatctgctggacttaaaatttcataagttgaaggatttgctaaaattgcctttgcatgaatacctgctttatgagtgaaagcacaaaaacctgtaattggattattaaatggaatattaacttgaacagcttctgcaaccagattttctaaatctcttaatttatgtaatttatatttacttaaaacatattctctatcagctgcaatcattctagccattaaaccacctaatggagtaataccatttctttcaccaatacctaaaactgagacatcaattaattttgcaccagcttctaaagcagtataagaattagcaattgcacaaccagtatcattatggaaatgacattcaatatcacatgaaacaactgattttaaagttttaactaattcataaacttgtcttggatttgcacaaccaacagtatctgcaataccaactctattaacaccaattttatcaacagttttataaatatttaataaatcaactatatcacttctaaaagaatcttcacttgaaaatctaatttcaatacctttacttttaacaaattcaataacttcaattgcatttttagtaatataagtcatatctttaccatgagaatattgtcttaaaaattgggaagtaccaataacgacatcaacaccatcaacaccagtttcaactgcaactcttgcatcatccatatgacatctaatatgagttaaaatttttgcctttaaacctaatttacaaattgcttcacaatcagctcttgattgttctgaagcaacaggtgaagttaattcaatataatcaacaccaaaatcatctaatgcttttgcaatttcaattttcttttcagtcgtaaagaaagcatttgcgaattgttcaccttctcttaaagttgattcaattaattgaaatgaacgaacatttgaaagataatcacttggatttggaccatatggattaacttgaacttttttatgttgttcttcagaaactttttgataatcgttcatatcagatgacatggcttgtatttaattttatagattgaactatgtgccaaagaaagaaatactaaaatcgaaaagaaggaaattacaaatacttagtcatgaaagtgcatggcagtggtaataaatattttttcattcgtctgagataacagaaattgtgtaaaggagagtcatagaaaaaattcactgtgcggaagggagattagtcactgttctatttcaatttgtatgggggaaatacacgatatgtactacactctcgtattatacgttattgtactgggtatgtagatatggatattagcccatactgtagtgcttagtactgaataagatactgtaaaaaaattgggttttattttgataaaattaccccttccataatattttttatattttactaatgatgttttttagagtttaattaaacaaataaaaagcactacaaacgggcttcagattttacaaaacaataatataacactggaagagactacaataaccaattaatccacatcaatcaatccaattgagcaaataattgactcaaatgaatcaatatattcccaaccacaacaatttcaatgtcgtgcccgataaactcaattttacaaacttttacatcgattttgctttgtttttttcattgcaacaatattttatcattattatgttttaaaaccttaaaattatacaaaaatctacgaaaggtaattataaccagtactttcatcatctctagcaagatattgttcatctaataaaacttcaattgcactcttaatttcactaacagttggtttaaatctatcaattatttgataaacttctgttattaaattttcatgtcttaaatgttttctagctttcattattctaacaataccagctttaagtatttcatgtttacgtctttcaatttcttcatttgtttccttttcttcattacgtgtctcaactggtttaacagttgaaaaattaacttttatctttttcgatgtatattcttttaccattgtaaaagttgtacttgatttgagtatatttttttcaccaggtggattttgtataattaatttattctttataaatgggatcatattttgtttgaaaacttcagcaggtaatgcagttttctctaataatattgaagttgttaaaatatcttcttcttggaaacatgataaaattgcatattgaaataatgaaactgtaaacaaatatggtggtttaccaggttttgaaatattagccttaacttcaattttagatctttcccatatccaatttaattgtctaccattatgtctctctttataaagttttgtaaataattcttcacttaaaactaattcctctggcagaataaatgaatcattattatttctgaaaattgaaccccatgatgctgtatctaaaatttttggttctaattcaacaactgaatctttattaacatcagtaattaaatctttataaattactcctaaatttttagaaattctaatatcattaaacatatttgtaattttatttgtatattcaacactatttgcagttttcaatctttgaataattaattcttcattttcaccgtcttcagcagataaattattaaataataatcttttagataaacatcttctataccaaatttcaaaactttccttatcttctaaaaatttaaaaattgtaataatttcttcaatattcatattattaaaattatcattatctataatgttattattagtatttactgatgtatttatattattatttttaccctttaaaaattcatcacaatatttagccaaatattcaggagttcttggtcttgatctattagttggagttgaaacaacattataattaatgaatttttgacatgcactatctaaagctttaataaatgctggattattatcaaatgaaacttcaacaacacctttaaatttgttataaattttcaataatgatttaatataattatttggatcaataatagtcttgaggtttcttaattttcactttagtttttgaattagcagcaacatttaaactttcaatataagcttcatttgcagttttaaaattttcatcagataattttttaaattgtataatttcttgagcaccttcattttcaatatatttttggaaaatttctaataataatggtaaagttgaaggaactctcttaagtaaagtattaatttttttaatatcaagataacgttcttgattcaataaagttggtaattcatttctaatttgatcttgatgtgttttaattaaaacattgtttaaaacatcattaagtggtttccttgtatgatcattcaaatcttctaagtttttcagttcttcatcaattctatctaatgctttattaacataatttacaacaccattttcattaatgaatttagcagacttcaattgcataaaaattatgagtatcagttaaaaatcttttctcaaaatcattaatataaactgataaattttgttttcttaaatcatttgcatcaaatcctaatagtacaaatgatttaattgcaatatttaattgtttaattgaactattaacaccttgtcgatgtaattgaatttgttccattatttcatccattaaaatattcaaatttggataaaatttataatctctccaagataataaacataaactgaaaatatcataaacatcacgatgcccacttgatctttcctttgtaacccaatatctatttaaataatccataacatcattcaatcgtttagatcctattaaatatcttttccatgatctaatataataatcaacaaatgattcattatctcttggtttactatttaaaagataatattttaaaaattctttaattttttcatataaatcactaccaactaatctaacagttgcattggaatttgaattcataatatctgaattattgccattaccattattaccattattattattattattaacatgaaatctctttgatgatgcagtacaataattataaacttttgtataagtatttgtgtacattaatgaatcaagtgaagaattttgatcatctccaagaattatattaagagatggttcaatactcttccaagtactctctaaaaacgagtctggcattacacaataaacttactgtatcctagatggaaatgatataagagtacccaatatacagcccaactctactcaatgaaagctcgggtggcacgtaagtcaatcccaagagttggaaagcgaggcaaatttaattattatactaaggtaaggtaacaaggtctttttattagtatacgtattacataatcattaatataactactagttcttctcatgataggagacaacatgaacaactctgaagacactgatactgaaattaatacaccagatagttaatgtaagaaataggaacgccgttaacgccttgactttaacacacattccagaatcaaacagtgaatcactatcatttatatcaattgtacaaacccatctggaatcataaatcgattcaaagctaagtgataaattagctgatgaaaatataatgaaaattaaatcaagcataattaatctaattttagcccttggatttcttaatcctaaaggttgtgatgtaaattcatcatatgtaatgtaaaataaataaagtattgaaactgcttgaacaatcattgccattaatggacttggttgttgtgtaatatcatatttttgagtcattttaacaattctagctgataatcctaatgcaatacttgataatgaaattgaaattaatctgaaaaataatgggaaatatgaatttgttcttattgattctaaaagttttggtttccatgtctttttattttcatcaatccaatatttggccctttcccttaaatctctttcacgtctaagtctacgtaaattaaatttacgtttaagtctcattctacgttttttatatcccatttcaagatctgtatcattatcattatcattattatcatcatcatcactattaccacccctataatgtcgattataattataatcactacttgtttgatcttcttcatcacagatatctgaatctgtagttgtatcattttcatgaagatcaggattcatatcatgaggcgattcaaataaccctcttaatctattttcacctttccaatttgaccataaatcataatttttgaaaatacttttcattaatgcttcatccttagcttttcttattttttcttgatcttcaattgtcaaattatcattattttgattaccatcatataccagatatggggaaatattagtattcgtagtattagaactattattattattattattcatattcatactcatattgaaatcatttacatctaacttggcatcatcaataaatgcttgaggattaccattttcatacttcttattatcacaattcaatgaagtttgaacgggtatattagaatttgcaattttaatagttttcaaaaaatccccccatttaacattattattttcatctataaaagtttcagtaaatggatctgataagttattattatagctaacatcattatttttcgttacatgtgctaatctatcaataacatatggtggtattgtgttagcatttaatctataataattatataaacttaacatatttggatcattattgggatttaaatttaaatttggaaaatcagcattattattattattattattatatcgtatacgagaatcttcatttcttgcattttgttcaattttatttagtaaatctgatgttttaatgacagtaccattatttttttgataattatcataattttgggtcatatcaagtgatttgggtaatttttttgattttgagatatcttcttcatgtttatcagttactgatgtcataattagttaaaatttttgtatgaaacagtatttgtagcaaatgagttttctgttgaattagatatagagcagtagattctttagcaaagattttaatatgcaaataaattgcaaatatgttctttgatgtagatcaaatagtaataaaataattaaatcctaaggaaaggaaattgatgtgacaataacttaatagggacataataacaataataataataaaaattaaataataatacaaataataacaaaaaaacatgtcgcttcccaaaagagtaattctcttctttatctaggagctattagcaattgacattgtctgtcaatggttagaatagcacaagtatcagtagtattggacaatagtcaatgacaataactaaaggagggtataaaatatattgctattactacttatatagcccataaaccctttcaatatcgatttaattgctataaatctgtacaccggtagtggcttgaacatttaagggctatgttacgttataataagaggagagtcttgcattaaacacatgttgatctgtatttcatatcctttattcctttcataaagataatgaatataggtaaaaacataggaatacgacacattggattaagatataatagtaatttatctaaaagtataccaattagtgaaattacacctcaattaagtaataaaagaatttatttttatgcattaccaattacaacaaggaaaacatttattcattgtaaatataacaatgatatattccccaatggtaaggaaacattagagaataaattaattaataaatttacaacagtttggaaaaatttttcaacatctgatgcaagtattaataaaaaagttgttaaaataattaatcaagtattaagtaaaattccatggttagagacatgtttactgtcaattccatcacaaaaatttattacaagaaaattgcgtgaagataaggaaagagagaaaaaatcagaatccaaatcagaatcagaatcagaatcagaatctcaaactacatcattcgttacacatgatacaattatttctaagaatttgaaaagtgaagatttagaacaatttgattattattatcctaaagggttaactaattctaaaataatgcttgaaacttttagacctgaatttaaacaacaatatgaaattcataggaaaggtatttataaagatttattattgatgccattaacaataccatttgcacttgtaccattattacctaatataccaggattttatttattatatagaatttattgtcatattaaggtaattgcatcattaaaatttttaattggacttttaaaagatttacattttaaatttcatgaagttgataatttaactgaaatctatttgagtacaaatgatattaaaattcaatctaatgttttagaacatttagcattaattaatgaaaataatctaaattcattagataatccaaatgatatagagggtaaatttttagaaatggatgaaaaattattaatatctaaggatgttgcagagaaattatgtgaagtgtttgatgataaagaatgtactgagaagttaatgtttgcaattgagcaagagagtaaacatcttgcagatagagaagctaagaatgttaatgatgaatagtaaatttaagtagattagtatgtatattgtgtaaaacttaagaaaccctattattctatcaaaatatttagaaagttaagcctccaaaatatgtcaaaaattaataaaaacattacgtaaccgtcacgtgcacacccaacgggtttgtcttttacaccctagaaccttgcccttattacctcattgggaaaactctcctctcttcactaataaatggataatatttcctcaacttggcgagggattggcttttcgtggaaagtacttgatctcttactataagattaatatttattccactataattcatctttcctccttctcttactctttgttttacttcttctcttttagcatacaaccacaatgagagctaagtggagaaagaagagagtcagaagactcaagagaaagagacggaaggttagagctagatccaaataagctcttggaaactcttaaactgtcttgttgattaaaaaataactttaaatcaatcatgaaacacaattatttatcgtaatgatggtaattatcatttatttttaaccacagtggttgggaataagtgtttaattattatcgttttatttaattttaagaaaaatccttttttttaatctaataatggttaatgttctttgcctattggtattcgctccaagtgttgtttatacattctatatttatattatttatattatctctatatactacatgaatattaataagccccattggctatgttattttaaaatctaataagtaacagtaattacattaccttctattataatacaacaccagacccgtctaacatgacaaccactcgtaacaattctcttacataattgattaccaccattttttttcatttttggaaattttgtgagggccgcccacacggatgacaaaacaccttataatttggcatcttaatctcgatgatatatacttgtaatcatttcattgtaactttctcttaaggggacagactactttatttcgtctttaaagaagtatatacactaaattatattatcagctacattattgcttttctggaattatctcttgtgccaattatttgtagtaaatatttatattagaccaactattatacattaaaaatagcagtaaaaagaaaaagaaaaacacaacagttaatctgcattttcaaaattaataccatttcacatatcataatataatataatacaatacaatggatttagattcagatatacagatggaagatgccaatgatcttcaacaaataaataataacacagaaactaacactaacaataatcaatctgatgaacctgaattaacaaaatcaattactaatattaataatgatgatgaaactaatacaacaacaaattcatttgtaacggaagttcaaatttcaacaacaaatcctaaaactcaaataaatacattagatggatggattgaacaattatcaaaatgtgaacctttaagtgaagattctgttaaagaattatgtaatatggcaattgaagttttaaaaaatgaacaaaatgttcaaccagttgaagtacctgttacaatttgtggtgatattcatggtcaatttcatgatttaatggaattatttaaaattggtggtccttgtcctgatacaaattatttatttatgggtgattatgttgatagaggttattattcagttgaaactgtttcttatttagttgcaatgaaagttagataccctaaaagaattacaattttaagaggtaatcatgaatcaagacaaattactcaagtttatggtttttatgatgaatgttttagaaaatatggttcttcaaatgtttggaaaattttcacagatttatttgattatttcccaattactgcattagttgataattcaatcttttgtttacatggtggtttatcaccaatgattgaaacaattgatcaagtacgtgaattaaatagatttcaagaagttcctcatgaaggtccaatgtgtgatttactttggtcagatcctgatgatagaggtggttggggaatctcaccaagaggtgcaggtttcacctttggtcaagatattagtgaacaatttaatcatacaaataatttaagtttaacagctagagctcatcaattagttatggaaggttatagttggactcatcaagatttagtcgttacaattttttcagctccaaattattgttatagatgtggtaatcaagctgcaattatggaagttgatgaaaatcataatagagatttcttacaatatgatccatcaattagacccggtgaaccaactgttagtagaaaaactcctgattatttcttataaaattaaactaacaactatacaatgatttgctaattaaatttttaattcaataaaaaataaaattcatccatctatatattccaattgataacttttcttacatactttatgactttatttttgtttcaatctttgtctcatttttatctttctttttacttctgttttaaactaaatccaatacttttttttattcaattcatcatacattacattatactaagtttaaaattttttacattttttcttttgtatttaaaggttttatattatatcatcaaaattatgtctttttaaatttaaaaagcaactaaattttatctatcattaaggtatttattattaaaagtacacatatcaggtacatattgtctatattgtataaaaaatctatttggtaatttgaaaagtccatggtaatattaaatgtgcaactttatcatcatcaataaatttagaaactgcactatatgaacctcttgctaaaaatccacttggtgcttcaacttcttcaaattctttttcataaaatggtttatcaacagtatttggtgcataactacccattggttcctcaattttatcaactgtaataccagcctttttaacaccttgtaaatattttaatcctgtaataatttcatgttgaactttgaatttaataattaatttataaatacttttctccttaattttaaaactaatttttttatcctttaatgaagaataatctttttcattctctaaattaataataactggttcttcaccttgaatttttaatgtcattgaaataatgacaactttacgtttatcaccattttcaacaggtaataaatcaccagtatttaatcctaaacttaatttccatttatttaatgattcatcatttgcatcaagattagcatattcttcaattgttctcttttcactaactttgaaacctggaactgattcaggttgtaaatctttaaattcgtcactcattactttctacttgattatatctaagtataatataatctttactctagatcaaaagatcgatcctctaacactaacgtgaatcgatggcgtttcatgtccacgtattatttcttgataacgtaatgtttaatgaaatagatagtctcatagtcggtgtttcatgttgtcattcaatcaaaggaccattaacatgatggtaatgtcaatagccctatataactttaaactttctgctgatgtctgtaactgattaatcagccaatcatcaactagttgtccactcatctgtttgtattactatcaaatacatacctgatattgagtactaacacttatatagtaagcttttgtaaatttcggagatcaccggtataccggttttttatatcatgaattcaaatttctcttagcaaaacttactactgaacttcactaattaactcttttcttcctccaaagatgtcaattagagcaccagaggaacttaataaatgcagtacaattgaacttgaacagatattagatcaattgtttgaaccatgttggacattaactaattttcttatccccaaaatccaaaatcatcaatcattcagttcatataatgaagtacttgaatattgtagaaataatttgatgtcattacttaacaattataaagaatgtaatgatgaaattgaaaaatccgaattacacaaaacactatgtaaaatagtatcggctcatccaaggttaggtgtccctaaagataagatatcttccttatctaaagactcacaaaatgaacaaaaatcattaacggagggtgaccctaacggtgaacttgcacaaaaattaaaattacttaatgataaatatgaagaaacattccctggtttaatctttgttgtgtttgttaatggtagatcaagagatcaaattatgaagataatgaatgaacgtatattaaatagtacttggataaatgaagtttcaatagcttttaatgaaatggtagatattgcatttgatagagctaggaaagtaaatgcaaaactctaaacatatttgaataataataacacaatatcactttgtactttatataaattatattgtatacacaatcttattacatataagtttaaaatgtttctttttggttggatttataaacatcattcatgatcatctttaggtacattatcattcacatcatcagtttgtgattgtgtttgatttgttaatttatcattttttcgtacataccccttaccagatctattaccattattatatttattgtttctaccacttcccataccataaccattatttatattatcattataatacatcattggattactaccaggcggtgacgctctattataaaatgaattattatttcttgaatttggattagaatttgatacatttggtggtggatagtaatattgataaactggtgtacttgtattaggtattattggagtagatgcaagtggaattggtatagagtttattggtattggcatagaatgctgagtcggtggaactattggcgattcccttgaattcagtggtgtactataacctggagatctagatgatgcacgattattagttgtttcagattctgcattactagaatcatcttcaatgtctccattactataatcattcagacgattatcaatattttcagttggtggaataactggaacataataatagccagctgatgatgatccaagtactggtgatgtcattggaatgttgtttgatggtatatgtacaggaggtgctaccatatatccataggatgtagattgtggattgttatattgatacatttgattattcggataatatccgtagttattatatccatagttattataacctggattaccattattattataattcatatttttattgttcagattgctatttctcctataatttctaccttttctataaccattgttattaaaatctgatcctcttctattatatttattcttgttattgtaattgtattgattataattgtaattattattgtaatcatttgaagcatcaggattatagttgaatgtattattatcatttagattatacttatattgatcacgacttcttaatgtcccattttcatcttgatttataataatttcagtttcatcatctccttcatcattaccttcatcttcatcctcattcccttcattttctttgtctattttctccttcgccagttgatatctttcttctttagttaatgtttcttcttcatcaacaatactttttataggctgctcatttttttgttctattggggttacttcatctttacgtttcataatacgtatattggatgtgttgttatctcttatatcaagattctggaaattgccaacaatatctccaccattagcaaggttcttattattattattattattattattattattattattattattattattattattattattattattattattattataattattattataattaatattattattgttgttcaaattagctttctcgaattgtgctttataatggttgtataaatcaaacaacttcattctatttaatttttcgtttggatcaaattttaaatttctaaaatctaatggtttaatattacccgaattatcaaatgtagcagattttttagtttcatcatcagcattaattagtgatgtattaattttaaataaaaccattgaagatccatcattcgaaagaatatgtcccagatgataatactccgctaattgatgagctaataatctataatatgagttcagtggtctcattttcaacgagtcgatattcggtttgataataaaagcaataatttctgcttcaaggctcaagagaaacttacaaacattatcatcatcaccaaatggagttgttattattgaagagttattattgatatcattagcaggatataatttctttttcttattattaaggtcaaatagtgattttataagaatatcaggtatatgataatgattagataaaattcttactttttcattaacttgttcaattccatcaatatctataaattcaaatttcccaccttcactaagtttcacattattatcttcactaacctcttcactcttaaattcattagttggctcattttcaggttgttttgactttgtggcgtaatcggacttattcttggtatcttcgataagagtttccatgtgtttatttaagtccggcccaccatccccaatattaagaacggtatctgttgtctctaatgtcatgggatttgttactatgcttattaggaatcgattgatataccccggttgttatggataagccttgaaagaaaatatacaagagaaaatagaggtggaaacctgagaaaaaaagagcttaccgaaatgttacagtagatgagactctattaaacaaagcccatattttctcttttgcgcaaattgcatttcacatttcacccattttctgtctctttaaattggtatagctacaggtattaatgcattggcaatcatactgaacggtctacaatctatgtagtatatgactgtagttacaacactattttaaattaacgataaaaaatctatataattttcttgcccccataggtcccccattatcattaagatgcagcaacaaggttagctcattgcaacatcaccatcgttatctccttgttcacgtttctgtaatctcttactttgaatccatgctgcaatcttttcacgtaattcattatcatcggttacatcttccatctttaatggcatacgattgaatggatcagttggatcattcattaaatgtgcctttaaaacacttctatcgatcgatatatgtgatgttggtaatttaacaggatctttcattaatgtatacattaatggatcaaggaattcatcaggtgcttcacctaattctaattcttcctcttcgtcagcaaccttaatactttcagctttcttagcaaattcaactaattgaccctcaaataatgaatcgggaattttaaaactcttctttaaaatattgattgctttataaatattttcaacattgaaagatcttaaatctctagcaacggctctaataaattcttcacattgtgataaattaatgaaaattgaacataattggaataataattcctttggatcaaattgatatttttcaggatctttaacctttaattcattatatcttggtccaactaaaacaaccaaattataatttaacataccagctaatctatcaacaatttcaactatagtgaaagattttggtgtctctttagtaaataaattaaataaaagaatagtcttattacttaattgaacaaatgatttagccattctttcactttcttgtaattttttattaatatcttcatcactttcttcattatcggttttaacaccccttgatcttaaattaagttccttttgacaattatgaatagtatgtaagtgatttaatgattcatctagcaaatatgtagtatcattcaacattctagcaacaaatctaataaagaacttttgatttttagttgcaattactcttaaatctttcttgaaaatatcaaatttccataatttttcaataataaatgaaatatgatatcttgaattgaacttatcatagaattgagatgatgcaccagttttttcaaccataacgtaaaaatctaataaggaaatcaataaattcttttgaatagtttcttcatcattgaaaataccaatcatgaatccatttatttcaccattgttactttgcattggtaaagatccaaagaataaaacttctgttaatctagcctttaaatgtggattacttaataattcaggacatcttaataaaataactgaaaattcaattaatttagttaatttaacattattatcaatcattggattatttgtaaatttggatatgaaatgacagtaattaattaaaccttcaatataaatttcaggataatatttgaaaggaactggtgcaagttttcttaagtactcaatatcatctaatttttcaacttcattatcaaaattattcaatggaatttgtaaatatgggaaaaaactaccgatttttggatgataggcatgcttagagtcaattaatctaactaaaaactcacaaatacctacaataacatcaaaaacttctaattggaatgttcttgcttggaaaaacatttctatagaatatatatcattttgtagttctttaagtttagcttccattggagctaatctcatatttactaatctttgagctaatgcattgccttgattacccttttccaaaatttgtttcatactagtgatttgttcctttatttgctttatatgcttcttcttcttattgtaactaacaattacaccacctaaaccatattgtaaatatgttaacatcaagtaaaaacattctgaaacaaaatttaattttttaccatctttgtcgtataatttgtctttataatattcatcacattcttgtttagttgaattaattctagtttcttcacttaagtcaatttcattgtttgaataattcaagaaatcaattgaaattttatcaattttacttgattgaccttctcttagaataggttctgataatttaataaggatcaatgaaacattcaacataagagaatctgatgaaattttcttttcatcaacatgttcactcattcttaaatgattcttattgacaagtttagagaaaaagctcaaaatttcagctctagagtttgcattgattctaaccagggaatcaataattgaaaataacttattgattaaaattgaataagtcgtgcttaaagattcattgattgatctgacatctttcttatttatgacaccaatataattatcagctgaaagtttagacaaaagtggtgaaattcttaaaattctaccaagaaaagtatctttctctaatttagttggatccgttatgttagaaggattgaaaaaatccatttggtaaatatatgaacatatgcttttattataaatcaaagattcaacaattaataaaatattgttataaattgaacttgtaccatttgatgatacattaatagaattagaatctaatgaagaatcaatttgggatgttaatattggagtaaacgagttaagaaagtctaattcaatttgattatcaacaatggcgtttaatatagaaatgaaaaaatcatggtatctattaatatttttcgttaaatcttcaacaacatttggtaaattaggactatcaataaatgtatcaggttcatagaatagaattgatgcataacctgaacataaacgcataatttctttataaaatgtcattttaacatcataatcatgagttgcatgtttatttttggttaagtgcaatttagaaatattagcattattccaacaatgaaataaatattttaagggagaagaataatgattcgtgactccttgttcaaaaatcagagatgttaaaacagcatcaggtccatcaattaatttaaaatcagtagatccagtttcttcgtataatgatcttaaaaagattaatgatttactttcttcatttggtgtaagtgtaactgataatacacgtttgatttcacttgcttcccaagtacccagatcaatttcttgtgtatttcctaatgaagaggatgaagaagaagttgaagcaggcaccggagtgttttgtgaagtattaattggagatgaagaactatttaatgatgtattggcatcatcattagttgatgatgaaggctttggtgtgttagtttcactattagtcttagaagttgaattatttcccagtttttgctttttatttaaagcttcaagtttggccaatcgcatcgctcttatttcatcttgcgaggaagccattttgtgtaattataagaaattccttgatataattaaggataaatcagttgatgagcccgtatcaattatacataccagattgacatgtaaaataataatattcacactactattaaataagctgcgataataatttttttcgccactgagaaactatacactacgtaacgtcaacggctattataataggttacaccatgataaatctgattatagtatatcatgctgatagataaacctatatgaataagaaaagagagttaaatttttagtttatttattaccacgtagtatattatattaattaattaaaatatataatcatataacttatgctttaagagcaaaagtcttaactgggtaagcaatagcagcttttcttgctctttcagtctttaaagatttttgttcagtagttaaagctcttcttaaagctctagtcttctttgctcttaattcctttggaacatatttcttacctgcatataaagctctaactgaagctctttgttgtgcattaataacggttaaaactctagcaatatcttttctgacagtcttaatctttggaacaaattgtttggttaatttttgaacctttaagtttgctaattctttctttaaatcaacaagttgttcttctaattgatccttagacttggttcttaattcgaatgcttttaatccagcctgtaattaaaattaatatttgaggaggggaggtaatctatgttagtatgctattcatataatgaatgtattagagagagggaagtttttgagtagatatctttactgtaactgatagtttcattatatttaatattgttgaaaatctttaacttgaatgttattggatatttcttaataacttcatatctttaggtattgtaacacacaacttgtaattagtcttaacaaatgataatatatttctacattaatctttcaatattattctgaagagttatattgataatttatattgcaattgttataaattctgtaattcaatgtttaatcatgtattatttgctaattcattaacagtttacttattctaaataacttcactataacagtattgattctctacttaatgtctcttcatgttgtatatctattacgtaccattgtgtttgatgatctcgagataattcaaagagtattctaaggtaaaattacaactgaaaatttaatatgataatagcactaaaatttgaaaaaaatcaaccattcacttacttcgctaatactaagaaaaaatttactcactgtgaaaaattcccttttcttttctgtgactgctttttttagtttccactcgaaatttcgctcttctaaaaatcctattatgagaaactgaaatttctgtgcgtcgaattctctgccttctctgtcgttaaaactgcggtgcaaggtgtgcttattaaacattgcttatgtcatcactggcaattttatattagatggctcagcttatcttatttagtttagtttaagggatattatgaagtaatcaatttaaagaatacaacaaacaatacatagaagtataaaaataaaatattacaatatttaagatgatttcaaagtaattgaagtaagtagtagtaattaagtaaaaaagtaagtaaagtaactaaactaattaattaattaagtaagtaaaattgaatttgattaatttgagagggtgttcaagtaaagtacaataacttatttaattatttattaattaagcactattttttaaggtattagataaccattctaaaccttcatataaaccatcaccagaagttgcacaagttgcttgaataaaccatggtcttggtctaattgattgaagacctaatttttcagtaatttctgctgctgtcatagcatttggtaaatcttgtttatttgcgaaaactaaaagaactgcatctcttaattcatcttcattaagcattctttgtaattcttctcttgcttctgcaattctatctctatcattagaatcaacaacgaaaataataccttgagtattttggaaataatgtctccataatggtctaatcttatcttgtccaccaacatcccaaacagtaaatgaaatgttcttatattcaacagtttcaacattaaaaccaatagttggaatagttgtcacaatttcacctaattttaatttatataaaatagtagttttaccagctgcatctaaaccaaccattaaaattctcatttctttacgaccgaaaaggccagataataatttagaaattgataaacccatctatgtttaaaaaaaaagataataataatgtattttatgttagtattagtttcaatattttgatcttatcagattatacataaaattttagtcttcaaatctctctttaattcgtataatcgtgataattaatttgaaattttctattgtcttcaaaaagaacacgcgcgctcaattaccctcctttatgataaggatgcacttaagcaaccactttattgtaatggatgagctgtatgataggacatgtaaatgaattgaattcaagtgtagttgactaaagtatgtatttcttacagtgtaatgtaatatatttgaactaatattgaaaaaatatacttatattcaatacgtgaaacatgaaacaaattgaataataatgatttaattgtatgatagtaaaaagtaattgctcattatgaattgtcaaacagcaatactatattatcaattcatttttgtgtaatatttgtaacaatataatatttgaataaaagagatgataaaagataatttgatgataattgatatttggataaaatataaacatgcaaagatagtatatagggaataaatcagataaaagacaagtagagtgaaacataatgtattaattcattcatttaagtgatgatttaagatgaaaataatattgaaaaacattgttttatatcggtgtttgttttgaaatctttcttgcaatagtataggtaattgactagtatcatataaataaatcaattacccatataacatatacataacgcccaattgcaaataaataatcataaatgatcataaatttcaaatcaaacacttattttctaaaaaaaaacccttgaatcaatttaatccttatgtatttgctccacttaatcattattttcttgattccttcccgttatctatattctccttacatatttcgcatagattaataatacataccttttgactgtgtctgtgtagatgcctttgaagaaatcaaaacaagaaatacctattcaaagcaaactattgccacccaaacaaaaaggacacactcaccaatataatttcagtaattgagaaaattggacgtcggcccaatagggaaagagcgcgattttcacctagctcagaaatctgatcgcatgatgcgaaatttgatctcagcttaaaatcagcccccttttattacccgtttaggaacttttgttttcacgataatataacactacatgctagagaaaaatggtataaagtatttaagttagatagcaatgactgaaggaggttattatattatttatttaaaatatttttatttcaatatccacatttaacgaccaatattgactttacatgtagaatatttttgaagtgcacgtaaaaatacaacatatgaaacttgatcattttctggttcccaatacatctcacttaatctaatatgccatggtggataaccttgtaaatctaaatatggttgaaacataacaattaaatcaggttcttcaccaactagttgtttaagttcatgatcaataaaattaattgttacatcacttttcttcatatcaccacttttaaccatttgtgccattactttagtaagttcaacaattgtttgacgtccatcaactttacctaaaagattaatttcaatttgaaattcttcattatcaatatcaatattaatagtaccactactattaatatctttattattatcattttcattaattttattaatttttttccccttagaatcatataatcctccattaataccataatatgtgatatttaaatgtggaattttaatcataaattgtggtacattttccataccaaaatatgcttcaaattttttataaattgcatcactaaattcaggaattgattttttcaaaataccatttgtttcataaatagttaaatggggtataccacttgaaacacaccaagcagcaactaatgatccatcattacataaaccttcaacacctccaccttcttcttgttcacttttataatttaaaattgttgctaatttatgaggaattttcggtaatttattaacatctgcattaattatacttggatcatcattcgatttatatgccatacttaaaaatttaatctttgttctagtaattgaatattcaaataatgcaaatattgaaaacataaaatagaaaaatgttaaaattgatctaaaaaaataaaatgtgattaattcattaattgaaatattattttcatcattaaaccaacgtttctttaaattttcatcttgtggtacaattaatgaacgaaatatcgaattacatgattctaagaatgtttgatttgtatgtgttggtaataaattttgtttcattgatttattaatggaaataccattatttatttcactttgattgatacgagccctcgttttttcaaacgccttttccttattaaatcccccattttgttgctcatcttgataattaggttccatatcagtaaccttttcaactttagagaccattctacactaataataagttgttgatgcctatattttttaagattagaagaaaatctagatagaaatatatttttagtgaaagatgacaaaatgttaaatttttgaaaatttaaatcatgtcaacttcgctgagcatttttcttgatataattttcattattcctattacgtaatatacaagttatctattcatgatgaaccattgggagaaccacttctccgtggatgtaaatcaaatcctgtttgattactgagatcatcaatgatagctcttaatgtctcatggtatgcagtgtcattattattattatcatcatcttcacggtagttttgtaaattttcgtcattatttatatgatcatctccatataatgcataattgaaatcaacatcatcaatatcaatatctatatcatcatttgattctccatcaacacttgaatttaaaacctcattattatcagcatctgataattcatccgatggataatgatcattatgtatagctaatatattatcagataaaatattatcacgttgatgtctttgttcccaaattctcaaatgttccattggtgataaacttgaattatttgtcatatatcgttgaagattatttccagtttcagtcatacctgtattatatttaattatatcattatcataatcattaccatcaatattattttcatgattatgattaatattatgattatcatcttcagttttatcaccattattattattatctaaataaaattcatttttcaaaatttctttattcatttccggtgatctataagcatatttacatcttctatacaattcatcaacttcttctaacattaaacctttagtttcataaacaaacagtacagtaaccattaatgctagtacattaaatgaaccccaaagaaaaaaaattctagtacctaaagtaccagtatgtgcaccttgatcaacaatatagggagttgaataagcaaaaacaaaattaacaatccaattagtaccagcagctaatgaaactgccttttgcctaatcgataaactaaataattcaccagttacaacccaaacaactggaccccaacttgatgcaaagaatgcaatgaaaacacaaacaaatgaaagcagaactttatttgaaacaattgaatctgtatttaatccaacaattgcaataacataatttgaaacaatcatacctaatgcaccaataattaataattttcttctaccaattttatcaactaataaaattccaggtatagtgaaaacaacgttaacaatataagttattaatgacattaaataagattcatcaacacctgtaccaacgaaaaagaaaacaccataataaaaaataaaattaatacctgaacattgttgacatgcttgaattaaaatacaagttaacattctagttaattgttttgatctaccatctgaactttggaaacaatctctataagttgccttaccattactaatttcataatcatacgaagctttaatttcaatcaattcttcaactaattcatcatcattaattgataatcttctaaatcttgataatgaaataattgcaccatctaaatcatttttcattacaaaataacgaggagattcaggtaaaaaccaaaatccaattaataacataaatgcccaaacaaattgtaaaccaattggaatcctaaaagattttggattattcatatttcttgtaccttgagaaattgcacttgaaactaataacccccaagtaattgcccattgatacattgaaataattgaacctctaatccaacttggtgatacttcagcttgatataatggtacaactgatgaaacaataccaacacctaaaccattaagaaatctaccagctaataaaagtccataaatttcagaacaaatttgtaaaataattccaatattaagtataaataataatgttataatcattgaaaatcttctaccatatttatcagaaaataaaggtgcaattaatgaacctgtaaatgtacctaatgataaaattgcagttaaaattgctctttcacttgatgtaaaattatcatgatttgaactaaaatgtgttttaaaataattcatttccattaatccattaacaattccagtatcatagccatagagaaatccaccaattgcagttaataaaccaactaaaactgcaataaatgatgatttaactttatttttttccatattttcaatacttcttaattgtttctctctatctttaatgaaaaagtttttaattaaattagttattgtatcaatcaatggtctattacgtattttctctttgctaatgataccattagtttcactattatcattattattattattatcatcactattattaacattcttatttcccgtacttaattccgataaatcattaaattctatatcatcagataatttgtttttgatcatactattccctcgttgtgaatcttgactattataatcaacataccacatatcgatcgcccttatcaatatattaactattccttactaaaacaacacacacactggataaaaaactaatcagattctagtgaatgacgtaaaaaccctttaattaagataaaaagaaaaaaaataatttgtggggggatttgttaatgagaagaggtcgcaaagtcgtgtttgatgaaattttatagatctataagctgagccgagtttttcattacattacacgttttatacactttatttacagaattatttctatttttatttctatttcatgaacttaaacaacgagaatcttttggatgatttcctgatcttactggtatcttctatttcagtattgtctttggatttatctgcataggcattagcattgtcattatcaagttcattattttcaactgtttgagatgggtttaagtttttcaattgacgtcttgtatcattttgatattgtagtggaacatactttaaaggtgcatcactatgcttttttctattgatttcctcatttaccacttcctccgattcatctatattttccctatcttcatcagatacaaaatcattaacaggtttttcatgtcttccgtcagatattgaagattttcgtttattaaatattccacttaaaaatgatcttctctttacattattgatattatttgtagttgtattattatttatatttgtattaacattggtattaattgattgtttatctacattatcaataactattgaaacagccggtgtttcaacattgtttttattatcaataattgaatcattaacaataacagaatcagaatgagttattgtatccattgaatttcttggattaataattatcggagttgatggtaatgaaggtaataaatctttttcaacacaaggttctaataaattattcatatctttagttcttgataagcttcttggtaaataatcaaaagaactgtttgttgaattatttgaaaatgttgaaatatttgaagaattcgatacatttctctttttgataaataaacttgatgcaaatgaaattgagtgggatatatttgaggttatatttgtattaatgtttgtattggtggtatttatattatgattgttgttattagttgatttattatttattatatgttcaatttgatgtaattcagatttaataaaatcagataaatcatcaattattattgaagattctaaaattaaatttgttaataattcttcatttgtaagataagaaaattttaaatcttcagtactaaaacttttagtacttgttattaaatccacacttttgaaaaaatttaattggaaaacttttgctaaatttgatgcatgcattttagttatttctgaaaattcttctcttgaaataatattaaggaaattaagtaagtataaaagtaaatgtaaattttctattggtaattttttcaatgcaattgaataaattgatttataatcatttcttgatggttgtattataataggtatatcattattgattttttcaaggttttcattggtatcttgatcttgattttgattttgattctgattttcaatatgactgattccattatgaacttcctttattggagaatcatttaaatttatggaattagtcatatcaatcaatgattcattatccgatatatcattcgatataggtatattattattattaatactattactattatctgattctgattcattattatcttcaatttcacttggataatctatattaaaggaatttcctttaattttacttaataaattagaaacatcagcagttattataccatcatctaatttagcaatccatcttttcaaaattactgcaacatctaaaacagttgttaaattatttgaattaaatttataatttaataaatttttatataattcagattcaatttgattaacttgtttaattgaaccattcattctaaataaaccttcaactggtggattatttaaaatataatcacaacatttaaaaacaattgttggtatgattaaatcaattttatcattatatttaaaagtataatttgcaatgattaattcagaatcaatatattttgttaaaattttattttgattcagatttggagttgatgaagaaaattgtgaatttgaaaaaaaagttgaatttggtcttgaatttgaatttgaatttgcaggtattgacttttgattattatttgaaattgcagtactatttaatgagaatgaacgtctatttgcagagaaagatcttcttttcggattatttattgtagtatggatggtactattattattattattgtagttattattaaagttattattatcaaatgattgatttgaatgtaaagtaaaagcagatattgatctacgcctattttctttattattagatggagatagagtgggagataatgttgttatcatagtattactatatttcattattattattgggtgtattaggtaatatggatgaatgtgaatagacaagatagactaagggatgatttataaagtaaataagataatatgagtgggtaatattaggtagtaaatacagaggatgtgaaataagataagttataagttataagttaataatataataacactaatcttttcaatcacaataataagaaatcatcacaataaaataaaataaaataaaaatgacaatcaaagtaaacatgaaacaagatggattaaacaaggtgcgcttagtgaaataaattcaaggggttttaaatttaaaaatattaaacgcgttattttattttattatatattatattacgtaatccagcatcacgtgactgattacataatcacagacgcgtctttttattgatttaatttatttaattttcattacgtaataataaatttatcctgtttatattgtgaagaataaaattattatactacgcattataacaataatattccctttattatgtaaacaaagagttatcttcatgatttattgttattattattatttgattatatgattaatcattaatttatcgtgattgactatacattcttgaatcatatacactttatagtatatactctcatatattcttatacccattaactcatagttacactatattcatatataaccactaattaacacataatattcaattcaatttaattcaatttaatttaataattaatactaataataataataatgatacacgagaatctttattctgctacttattcaggggttgcagtttatgaatttattcatccaaaatcttcagttatgagaaggaaaaaagatggttgggttaatgcaactcatattttaaaagttgcaaatttccctaaagcaaagagaactagaattttagaaaaagatgttcaaactggtattcatgaaaaagttcaaggtggttatggtaaatatcaaggtacttgggtacctttaaagagagcaattgaaattgctcaacaatttggtgttttaaatgaattaaatccaattttcgattatatatcaaataattcaataactcctcctccagctccgaaacatcatcattcaacaactgctaatggtacaagaaaacaacgtataaataataatactaataatactaataataaagtaaagacaattactaaaaaggatgaaactaacatacgaaataatgatgaaaataaccctaatgatacaacaacaaaacccaaatcttcaacaaaggctaaacaaaaatcaaaatcaaataatcaaacctctgatactccaactaaatcaactagaaaatataaacgtcaaaaaatttcaaatattaaaacagatttatcattaaatgattcatcaatacccaatcaaattaatgatcaacaaaataatttacctattaataattcaaaaaattctttacaattaccttcatttaataatatgaatttatcattaaattctgtacccgttcatggaatggggataagcaatatgaatagtatgaatagtatgaataataataatatgaataatatgatgatgatgaattccaataacaattttgatcaaagaagaacgttaaaagctccaaaaggtataatgtctccatcttcactaacatattctccatacaataatatcaataataataacaatttggaagctgatttagatgatgaattagaagatgatgaaaatgaacagaataatcttaatgacaataataatagacaacttgaatctctctatcgccgacttcatgaaccttcaactgttgaatttatgtcagaacatgatattgataaagcattagcagagagtgaaacatatgggaatgaatcaaaaagatcattacaaaatgattcatttttcaaaaattctaaacaatttaatatgtcaccatctaactcaataaaagaaaatcaacaaatttcaatacaacagcaacaacagcagcaacaacaacaacaacaacaacaacaacaacaacaacaacagcaacctcaattagataaaagttttgttaaattattatataattattttattgaattagattcaaattcaaattgtgaaatgccatattttattacaaatgaatcaaaagattttaatattaatcaaccaattgataatcaaggcaatactgcattacattgggcttgttcaatgggtgattataaaatgtgtgaaattttaatcaatagaaatgcaaatactcaattattgaataatcaaggtgaagaaccattagttagaagtgtaatttatgcaaactgttatacaagaagaactttcagtaaattattagacttatttaataataatttacttaatttagattataattcaagaactttattacatcatattgcaattgcaacatccgataataacaatttaccatcatcaagatattacactgaaattttattgagaaaaattgctgaaaatgttgataatattaattttaaaaaatttattgataaacaggatattaatgggaatactgctttacatattttcagttataataatgcaaaaaaatgtattaaaattttattaggttataatgcaagaattgatatcggtaataaatcaaataatttagtaagtgattatttaagtgaaaattttaaaaatgatatgaatctacataataataataatatcaataatttaaatcacaacactcttcacaatgatgaaaataatgaaattggcgaatcttttagtttaagaccttttaaaccaatgttacaaccaattactgataataatagtataagacaagataattttaaaataactaattctattttagatccatttcaaatatcaacatcaaataatttattaaattttggacaatcaacatttttaccaaatttattaatgtcatttaatcaaaataaatcaaatcatttaagtacaacatcaatgaaaatgaatcaattaagtattgaaatggttaataaattaaatgatttatcaaattcctttgattctgaaattaaacaaaaatcagatgatataaaggaattaacatcaattgttgaaacaatgaataatgatattgaaaaaattaataatgaatcaaatgaattattagaatctgtttctgttaatagaaatgatgataatattttaaaggataaattaattttattagataatgaatttaatgaaaaggagacaattttgaaaaaaattaattgatagatcacaggcaatggatttagctaaaattgttcaaaaatttgaaaatgagagtttatcaaaaattgataataatgataatattaatcataatattaaaaataaaccaatttcgaatgatttaattttcaaattaattgaattaacaaaattacaaataattaggaaaaaatcagttgaaaaaattgttgatattaattcaatttcagatactaataaaaatataattacaagttataggaaattagtttcaaaactgtcaaatatgccaattaatgaagttgactatagtttaaatagtattgaagaatgtcttaaaagagatttagggagagatatggtattaaatatggaagaggctaaatagctttgattttcatgttgtataattttgtaaatatgtaattataatgtacacttttcgtcaacctatcagcatgtcaattaaagaatcgttatgagctcgcaaaacggagattctaaaatttatgttctttcgataacaacaaaccttttttttatctaatatttatcaacaatgtcaggatataaactacaagataatgaagttcaatttcaattaaacacccccactaaagattcagaaactttcatatcatgtattttaagtaaacctgaaaaatcttccccaattaccaacagagcagcaattttaatgcatggtattggagctcataaaaattcatgttatatgtcaaaacttgcaaggaaattatctaaagaacaaggtatttatgtaattagatttgattttagaaattgtggagattcaagtaaaactggatcaaagggtcgtacattaaatgatgatattgaatgatttatcagttgtttatgaatggttgaataattttgaaaatatcaatggtggaaaactttttgttgatacattagttggtacattcaaggggtgttgttgatgtattaaattggcaattacacaataaggataaatttataagtaatttaggtttatgtgcaggtagatttataggatctggattattagagagtattaaggttaaaaatcctgatgttgaaaaaactggtggtcattatattaaaggatttcaagatggatgttataaggatgtttgggttccattggaagaaactcttagtttgagtgaattatatatggatacagttaaggaaattactaaggatactgatactttaacagtttatggaagtcgagagaatgttattccaataacagattgtgctaattatgttaataatttaaaggatagaaatacattgattttaataccagatggtgatcattgttataaaggtgttgataaaatacctgaaagtgaatgggaaaattcaactattccaattgataaaaaattaggtgtctgtgattataattatcaagttgcagatgaaattgctaaatggatgtctgaagatagtatgaataagagattttatgaaaagaatttgatgattggtgaattcacacctagatggaagaaaattgaaggtgttggtaattttagagatttaggaggttggaaatgtaaatctggtgaaagagttaaaattggtaaagtttttagatcaggtaagttatcaaatattacagaagatggtattaaagagttaaaaaaattaggtattaagaaagttttcgatttaagattaccaattgaacaaaaaatgtcagataaaactgaagaatctaattggactattgaaagtgatgttgaagttattaaattaattgaaaaagatgatatggaatcatttgacggtgtaaatatgttattaaatttaataaggctttcatttgattggagtaatacagtagataaatataagtccacattagaagatataatcccacaaaccaaggaaattttttatacattaagagatgaaccaaatactaaaatattaattcattgtggaggtggtaaggatcgtacagggttagtttcaatgattttacttttaattttaggcgttgaaccattaattgttgtacaggaatacgccttatctcaacaaagtattaaggaaattaataatacccgtaataaatcagagaaattgattgaattttattgaaagttcaacaactacagttgaattcattgaaaagaataaaccatatgattcatggcaatataaagttgaaggtattgacgcattatcagatgtacattctaatgtttgtttatctacaatttcttatttaattaaagaatacggtagtattgaaaactacttacgagttaagatgggtattacagaagaggatatctctattatcagagctaatctactccaagaagagagtgtattctgtagatcccttaccgagaagtgttgaaattggcccaacagagggtgtttcaaggggaatgagggggaacattttctccgttaccggctatataccaccgtgacatttaaaatttttaaccggtaacgggattacggagatgactgaatttttgattttttttcagttttcacctgattacagcagttttccattttattttgttataatatctactttcttttctagtttgttactgtataatctcaaataagtatactctattcaatcaaaaatggcgtttagacaaagtatggtgatgcttaaggaggcatccagacttgcatataaaaatatgttaagggatccttcagttaagtattcaagaacaaaagctattaaacttcatgatagaacgtggcctgataaagttattgacaaacctccaagatggttatcaacagatttaagagatggtaatcaatcattaccagatccaatgtccgttgaacagaaaaaggaatatttccataaattattagaaattggttttaaggaaattgaagtttcattcccaagtgcttcacaaactgattttgattttacaagatatgcagttgaaaattgtcctaaagatgttgcaattcaatgtttagttcaatcaagagaacatttaatcagaagaactgttgatgcattaaagggtgcaccaactgcaattgttcatacatatttagcaacatctgatttatttagagatgttgttttcaaaatgtcacaagaggaagcaattgaaaaagctgttgaaactgctaaatttgttagatcattaacaaaggatgatccaactttacaagatactaaatgggtttatcaattttcaccagaatgtttctctgatacaccatcagattttgcattaaaaatttgtgaagctgttaaagaagcttgggaaccaactgttgataatccaataattttcaatttacctgcaactgttgaagttgcatctccaaatgtttatgcagatcaagttgaatatttttgtagaaatataagtgaaagagaaaaagttgttgtttcacttcattgtcataatgatagaggttcaggtgttgcagcaattgaattaggtttattagcaggtggtgatagagttgaaggttgtcttttcggtaatggtgaaagaactggtaatgttgatttagtaactttagcattaaatatgtatacagaaggtgtttcacctgaattagatttttcagatattcaaagtataattgatgttgttgaaaaaggtaataaaattccaattcatgaaagagctccatatggtggttcattagttgtttgtgcattttcaggttctcatcaagatgcaattaagaaaggttttattgaacatgaaaagagagttgctaatggtgataaaagatggatgatgccatatttaccattagatccaaaagatattggtagaagttatgaagcagttattagagttaattcacaatcaggtaaaggtggtgctgcatggattgttcaaagagcaattggtttagatttaccaagacaattacaaattttattttcaaaagtcgttcaagataaggcagattcattaggtagagaattaaaatctgatgaaattgttgagttattaacagaaacttataatattgattcaaaaataaataattcattaaaattagctgaatataaatatgataaagtttcagaggaagttactaaagtttatggtattattgaagttaatggtgaaaaaattaatatttcaggtactggtaatggtccaatctcttcattattggatgcatttggtaatgcattcaaaactgaattagaagttgaagaatattctgaacatgcattaggttcaggttcaaaaactaaggcagcatcattccttaaaatttcatgtaatgataaaactcaatggggtattggtactcatgaatctgttactaaatcaactgttaattcaattttatcagttgttaatagtttattatcaaagaatattatttctaaataataggaataatatcattaataaatgtactttataccaatcattttttaaaggtttataactatatttttttatatctattattcatttctctgtttattacaatatttatgatggatacattaatccattcatacatttttcaggtattggagtattttcttcaacttctaatttaccaactttccaatataatggatgattattataataatccaaccaatgagtaattgtattttcaatataatcattataataacccgtattccttaaatcccaagtacattgatttaaatcatggaaacatccattaataaatatcctagtacaatctttacctttgaaaattgaatatctagcagtaatactactcgggtcatacatttccttattcaaagtaacatcaaatacagttctattaattgatattaaatatctttccttttcattaaataatgattcaattgtataattaatttgtggtgaaccttttaatttatatgataaataattccaatctacatatttagtatcattatacccccataatgttgttgatgtgaagaagtaggataaaagggcattaaatagtataatccctgaacaaacccttagtatatccaatgtccacatgttagcagaagtctgtggtcttctaatgaaattgtagagaagccctgttttcccagtgaagtgtttaaaacgcgtataaaagaaactgtatttcctctaacgcataattgaaaattttattcttttgatttatcttcttttcctgtaccaaaaccttcctatagacagtacgctggtcttttctttaggagtaatcttaaagagatattgtgttggcgtattttaagttattctcgatgaacggtttcttttgttttcggttttgatttgttttattctaagttttcaatgattaattttttcaatcgtgaatagtttttattcacattatgtttgaattgattaattattgattgcgtatcttcggaatggatttaataatgagagattgttaataagactaatttgtttattgttaatgaattattatacggtttaacctttatttgttgaaaaacgataggactagaacgtgataatgggaggagagataaatgcatttatgttaataagaactcgtctggatctttaattagaacggaaagaggggtgtcagataacatacacatcttttaatttataatttgtaattgtaattgtaatttgtaatcttaattgtaaataatatactacaactcactatcttttattcagattaatatcataatagctatattttgtacaatggaaataaatttacatcgataactaattctcaagattttaactataatttgtaattataaaaagagacattactcaaattaatgcctacatggtcaactatacatttatcaatttaataccctttacacaaccagtgtatataacaactaaactattaacttaacgttcctttaataatttatttctcttctctcttctctttaatctttcaattttctttgcatgcattacacttgcaagtctttcatatctttcttgttcctctttcttttcacgtttttccttaattttagcaattctagcctttttttcattctccttttcttcaattaatgcctttaattttgccttatcttgttgttcctttaattttaattcttgtcttttagcaaatgatgatttaacacctaatgatttaattctaaatgcatttttttcaactttccaatttttcccactaacacgtttaccctttcctggatctacaggaattacttcttcaatagtagctttagatactgtagacatggttattctataaaggaaaaattataaaaaagtatattttaaaagaaagaaaaaaattttctaaaagattaaaaattcatgttgcgctaagtaaaaaaaaataatctatttttgagcccacttgaaatagttacaattacaatctttatcagtaagtttagtttcattattattaccatcattatcgtcccatattcgatccttggatggtttagcacaacaccagaatttacgtcccatattggctccttttttggttgttcttaaaacacatggttcatcatgactacatgttggtatagttgatgaagatcttaacattgtattaaaatttgtaagtttagtagtatcaggttgtgaataagacattttttgaacatcaccatcacaattatcattatcattatcattatcttcatcatcagaatcttcagtaacaaacaatgatgattcattaattttggcattattagaagcagttttcttttgtaatactgagaataaagttgcttgatttttaggttttttcctactttcataagcaggtgtagtttgtgatctttttaccggtgcagagagtgatgatattatattaggtcctggagaaggagaaatagttgatgctgatgatgattgttttgatttgaaaaaagatgcaattgatttaaatgatgctaaatcataataattcattgcttcaaaatgtttaaaattaggagttaatgaagataatgatgttgatgatgaatttaatgaggatatatcaatatcacaataaactggacaatgatcagaaccataaaggaaattccaaatatcacaattaacacataattcttcaatttttttagttgataagaataaatcaattcttgaaccaatatttaatggtctattatttaataatgtattccaacaagtatattttttcattttattgatatttttatatctacctaaatcgaataagaatttattttcattagattgtaaattttcataatcatataaatatttccaaagtatagttcttgataatttattatttctaaaatcaagtacttcacttgcattaataaattcaaatgatttatcattaattttattagttattaataaattatttttaataccaattgcaatttcatcatctctatcaattaaacttggagaaatatttatatcacccattataattacatttttacccattttttctaaatttttaactctttgaaataaagtttcaatgaaaagacaacgagaagtttcctcaatttcattatttgaagaatttgcaggacaataagtggcaattataattaaattaattgataattcaacaattatacatctaccatctgaatcaattgattgaccaattttccaatcaattatattatcagtataaccaccaattgaacaacaagattcatcattttctttatataaccattcttttctataagtattcttagaacctttaattgttaaaaatccagttataccattttcaacttttaaaattttataattattagaatttttaatgaaaagggatacaccactataaccctttttagatattggaattgaaataaaagatttataatttggtaaattagctaaatttttatttatatcactttgttgtaattttaattcttgaaatgagattatatcagcattgaaaaaatctaaagatttagataaattatcaaattgattccaagggtggtaatgatttaaagttttataaccattaatattaaaagatacaagtcgtatacaatttgaaagtggtattgatattgaaccatcaatttgtaccataattattgaaagaaagaaaaccacacatgcattaattacataattggtaatggtctctgtttgaaaataattctttgagttattacatctgataattcagccgcggaatctgttgtctttaatagggctaatggtggatcaagtgtttcaattgtaccaagtaatctttgtgaagtacttatataaagggttgccttgttggaattagaatcaatctctaatttaccgattttaacagtttctaatgtagtattagcattagtatcattagaagttgtgatattattattatcaatagtagaagaatcgacgccattcgcgtcgacgtgtaatttttccaaaacatttggaattgaagtttcaccaaaaagggggctctcattagaaactgttggtaatgataaatcaccctgaatttccaccagtagtaaaccacgaggagtggtcagtagagacgatgatgaagatgatagtgtagtagataatgatcttacagcaggtgatacatctatatccaatactggcattgttgataaagagtataattatataactaacacggtataacagccacagttgaccgaatacaacaacaacaggaaaaaaaaataaaaaaaattggaaaaatcagacgatagttttcctcactcgtatagaaaaccattactatacttattttatcggaacaattaagcaactccgggtgtactatataaatactgtcctatctcccatcccatgtgcttgttttaattatttatttaatttttcattttaattatgtctctacacttcttttcatatttgtttcttttaacatactttctctaactactaactcaatgaatcctgcaatttaccactcttctcgtcttcctgctcttttatatttatcaattgcaatgacaattcctttcatgttaccaattaaaacaacaattaatcaaaaagataaagatcatatcggtaattttagtgttggtaatgcttttaggatataaatgtatatattccatacactcataccattctatcactaatctttactaaattacatatcatttcagttcattttatcttacctcctttatatcttttctcttcataacaggttttaataataaaaaattatcattctacagggtagtatgacaattcatttaatctttttttttaattctataacttatatttaatactttataatatactttatatgtatcggtctaaaaatatatacttaaacacaaacacacatatacacaccataatcactcattatatcgtaaatgtaatgcattctgaaaatgtacatgtttaatacctggttctttactctccttaaatcctataattgcttcattaacactccatcctaatttctcaattaaataacaacaaattaaaaatcctgttctattttgtccataatgacaatgaacaacaataaattgattatcaatatctctttccttcattagtttattaattatttcaataaatttaacaatagtaatattatctggtgtaactttactctctgttttatatttgaatatatttaattctttggaaattctttggttcatatgatggtgtatctgatccaatatcaacaattgcaaatatttctggatgttccatttcaaaattaattggattatgaattaaatctgtttgtcttaatgttttcataccaagtaaataacttataggtttatttggtgatattttattaataattggtttggataatgtaacaactttattccatttaacttcattttttaacccccatttatctcctgataaaattgcttttatttttaatacccatgtacaacttatattaatatttaaatcttcaataaatttataaataatcccacttataagttctggtttatctaaaaataatgaatgattacaattattaactttctcaaatttaatttcaatatcattattaccttccttaatcattttaacaatcttttcactctctgaaactttagttattttatcaaattctccacaacaaaccatcattttacctttacttattttactactcaaaattttcaattcttcctcactaacacttctgaaaccttttaaatattttaaaaatatacttgattcagtatctaaattccatctaaattgtgttaatcttttaatatttcatcaccgccatcaccatcatcttcgtcttcaatgttcctctcattattacaataaatataattattaacactaattagaatataatcctccaaatctatcgaaaaatctataataatcaaatattttagaattataacaacataaatttaaaaaccatcgtttactccaatggaacctattgaatataactttctcttcactaactccaggtggtgacatcattataaatgatactactctaccattttctaaattattaataatttttgtactaatatgtgtacccattgaatgtgcaataaatataaatttcctattagggaatttataatctaatatttgttgaatcatatcagcaattgaatcagtttgataatcttcatcctttaataatttcaaacattcttctaatttatttaattcttcatcattatatttagataacatactaaatttaattccattattattcctacttggtctctttgaattaccaaatccaggtaaatcaattccgaaaaatatcactacaatttctaaattcttttaaaattggttcaaattgtgatatttgaccacctaatccatgaatgaaaataattacaggtaatgtatcaatttccattaattgtttctctgcattacgtaattgttcagtatttgaatctttataatctttaatagatcttttataaaattctcttaatggatgatcactatagatagttgcaagtgaaatttcattgatatgtgatctatcattaattgggaatgattcaatttgtgaatatttttcaacgaatgaacaatcacttggttttaatcttaatatttccttttctaaatcagtgaatagatcattattccaatatttccaaaggctaccagatactgagactctagttgtatcatcaattctctgtaactctttcaatcgaggtatggacaatacatccctattaatatactctcccatggtacttatactattataataataaattaaagagaaacgtgaatgttaatgactctgacatgcacttagtgaagtgaagaaatatcggaaattcccttatcgcgaacattaagaaaaggggcattacatcatgaaattaaggtggcttcacttttccattaatgtgatgaggtttttgctcccattttctttatttatctttggctttgaggtctccgatttctcttttgagtggcaatggattcaatacaggggactcatcgtcgtagtttagatactctgatggatttgacatcttcaaagttgtcaaaattatctaatattggttcaaataatactattaatagtaataatgcttatctttccacaatcggctcggagtataataataatgattttaataataataactataaaatctctcatgtttctaatattccagttaaatctttcagttcaaggtataaacatcagaaaaaattaggttcaggtagttttggagttgttggtttatatgaaatgtgtcctggagtatatgaatcgaattatactgaaatgaaatcttctaaaggctcacttctttatcctttatcaattaattataaattaaatgataatttagttgcaattaaaacaatgagtaaaacattgaaaagaacttcagattattctaaaattaaagaaatgcaattcattttctctgttgattcccattttaatcttgttcaaataatggatgttttcattgatagacatcattttaaattacatattgtaatggaaacaatgcaacaaaatttatatcaagttatgaaatcaagaaaacataacatcttttcagctaaaactcttaaatcaattctattccaattattaagtgcaattagtcatattcataaacatttattctttcatagagatgttaaaccagaaaatatacttgttctcgtgtaatgttaattattttggttcacctaaaaatatacctgaaaatcaaataattaattcttatattgttaaattagcatgattatggtttagctagacattcaacaaataaaaagcaatttactgcttatgtttcgacaagatggtatagatctccagaaattttattaagacaaaattcattattcctatccggtggatatttgggcttttggttgtgttgctgttgaatgtgcaacttttatacctttattccctggtgcaaatgaattagatcaatgtaataaaatgatggattttttaggtaatccaacaactgcattctataatcatgtcttgaaaactaataatatatctgcacaatcttttaaaaatcaaaataatgaagagattaaaccttttggtggattttgggatgattcaaaattattagcttccaaattaggtataacctttccaaatcatttcggtaatttattagaaaattttatcaaaaagaatgattttcctggtaatgaaagagaacatttctttaaaatgatcagaaaatgtttaacgtgggatccaaaagatagagcaactgcaaatgaaatttttcagatgccatatttccaaaattcaatttattcactaaataatcaaaaggaaaataatttatttatcaaaaattataaaggctctgataggattaatcaaaaaattattaatccattaccaatatcaaatatgataaaggataattataatgataattatagatcaattaaaaatattcaattatctactaatccacatatgaaatttaatcaacaatatgatagtaattatattaccaatgatcaaaataactatgatggttaataatattaacaacaacaataacaataataatgattcaaataagaatatgaaaacttcattaatggttgcaggaatttcaccatctaaaattgtttataatagtgataccaataataacagcatcgacaatcattatggatattcacaaaatccaatccaaatctaaatctgaatctgaatctgaatccgaatttgaaactaagtccttataatcatcatcgtattaaaaattctaatgttggattaggagttattcaaccaactggattgaagttttcaagaaataaacaaattaataatcatagttatcaaaatcataatagtgatgatctaaataatatttcagtatcagatcaacttgaagattataataattttatgactgagccacctctcaatgatgattatgaaacttcattaaatcttatatcacaacttattgatgaagaagaaaataataatgatgaaaatatatcgaatggaaagattaaaaatccattcaagaaaataaatgttgatgatattgatgaagatgaagttgataatgaagatatcgatgaagatgaagatgacgacgaagaagatgatgaagatgaagattatgacgaagaggaacaacgattagagaaagaattattatcattggagatgaataaagttgctttattcttagaagaatctgagaaagattccaataatgaagtttatattcatcaaaagaatgaaaagaactatgatttaattgatgaaattgatcttgcattagatgaggagttaaccagtgaacatcctgatttaagttggagatatgaaaaataatattctataagatgttaattactttgctttactatatattttctatttaatatacctatttataaaatgcctaaataatcaatatttaataccccccaaaaatatgaagtttatttatctacaatgatacataatttttattatcacttatactatcacctacaggtcctacaataaattcaacattctcatcatctgaatcactcatattattatcattattattattactatgttcatctttatcttctttatcatcattatttgaatcataaacaatactaacaacattatcattatctttatttcttgtaattaatttcatatcattttcaattaaatcactattatgtaaacaattacaatcattaggatctaaacatctaccatattctttaacatcaggacaattaaatgaatgtataaatttacaatttaaaccagattcacaatattttaaacaagcaaatggacgacaaattggtgatgactgatcctctaatttatgtgtaaatatacaatcattatttgtacatttaccaatttgaaaaaatttacaacttggtgaattaaattgagttggtttatgtgaatagtgacatgatttatctaaacatttatgatttttattactttgcattcttggacataatgcaacatgtgttggatcatgtaaatataaacaaaatggttgagtacaaataccatatgatgtataatatttacatggtaaattagccttattctcatcatgtttgctatattggtaattctgtgttagtataaacatattcgatattgagaaactttaataaatacttacattctacttgtttgttccatatgataattaccatttggttgtttaatataatatttcccattatattttatatgagttggcattgaatatgcatcttcaattggttctttagtaatttcattacaagttgataataaacaaaaacatctatccatatgaattaaaacatatttataaccattaaagaaaaatctattatatgtacgatgatatcttctacttgataatattttttgaataaatggattattaatattaacttgtttcttcctatttggtaatcttgttaaattttgatttaatgtaacttttgaattaaccgataatggtatatgatacttacgtcctgttggtgtgttagtaaaaattggtttcgttattggattttgatggtttcttattcttattgattctattagttgttgaaaatttttgttcatttattaacgttttaatagatttttgttgtaccatttttctctattaaacttttttgttttaattgttttaatctttcaacaagttctcgttgttgttcaactttcccttgtaattttgataatgactctcttaaagctttttcttcttcttctactgactgattattcattactttgataaaagtaaggttaaaaatatgattgtagaagctttcaaataaaaacgttgaaaataaatttaacgatatatgaaaaacatgaaaaacttcaaatccgaaattcatgattcatgcattttcttctttatgcatcttaatttccttcattatacaaactaaatgacatcatatacattaaatcagataaagaaatttggtcatgatagcagttcaaaatatcattccattggaatgatcaatccattgatgaaatggttcaatatgcattaagtacattcaaaacaagagattcaatgagtagtcattttgttgatttattaggaccgacggatcaaacatttgattttgtaggacaattctgtgatatggtatttggatccaactaaatccagtggctcatgaaaatgttcctaaagtagtgaaaactaaagaacctactaaacctacctgttcctaacctaaacctaaaggtacaggtgttagattagtcaaaaagaaaattataacaactactaaaggtagaatgactaacaattccaaaaatggatcaactacatctgatagtgtttgatttaaagccagctactgttgaaaaagagaaagttaaacaaaaagtgattaagaaaaagatagataatattgaagagttagataaagtattaattcaacttgagattgctaatgatgaaagaaggaatggtgatgatattaggatatgtaactgtaatgcaacacgacatccattgtttgaaatgtatcctaattgtttaaattgtggtaagattatttgcgaaaaggaaggattacaaccatgttcattctgtggtgcatcacttatgagtaatgaagagagagctgaaatttctgaaataatcaataaggagaaggagaaattagaggatgaagctaataatgtaacgaagagtacaacacaaccctctgtaagaccaaagaagaaaaatgtcatcaaaatatcattaaataatactggacagaacaatttcaaagtacaagagaaatttttcaaacaaatagaggataaggagaaacaacgtaaaatagaggaagaggcacaacagaaagagaaagaacttataaaacaaaatcaagaagatttagaattttataaatccagacatcaaaaggatgaagaattaattaaagcagaagaaagattagcaatgttattaaattttcaagataatggagctgaacgtactaaaattattgatcatgcagctgattttgatttaccaagtggagaaaatggaggttcattatgggcatcaccaatggaaagagtattacaatttaaaagacaacaaaaacttcaaaatcgtatgagggaacaagaattacaaagatcaggacgtggtgcaatggttataaatgcggatattatgcaagatggacaattagtatatcaaaatggaccaagtaatgaagatattaatgttacagataatttatcagatgatgaagaaattacagaattacagagtaaaattaatgaagaaaagaagacacaatttaataatgaaagttaagaatgtttatgattattcagaatttacacaaaatttacataaacctatttacaaaggtaatatcaaggaaacaagtaatgaagatagtgatgaaatgttatcacaaatgccagcattgggtactattgtgcaattaggtgatgcagaagaacaagaaaatcaattattctccatgattggtgtgtgatgagcaatctacattatattctatatagtatattctacgtttataaatatataatacactatctctaatacaattaatatataccaccagtacctgatatatataaagatcttagaaagacactgtagtgctatattaaagaaaccctcactgtgagtggaaaaagtttttcattgcgtgggaaaagtataaaaggaagagcatatctcctatttgaaatttttcattcttttggatattttcttttcctttaatcttttggttttcttcctttatcacatcagtagaggttatactacgtataatttccgggagagatacgtctctcccaaaaatagaaccatttgatagattaccattcagccattgttgctgtcttagggaaaatccggttttcatcaagttcagctaaatgtttgtcgacttgtctaacaaacttgtcacggctaacatttcgtttcaggttcttagagtgattgtatcgcgttagttttagatcgatgtttgttagttatttaatttttaaattaaatatattccattcatccgactaattgtgtttctacattgtattattgtatcgtaatcgtaattgtaattttaaatagtaatgaatttattttatctttaaagactaagttagatacccgtcttccttattttaaagttgatattattattaatattgatattaatgttataaaaaaatttaatgttatatacagtcgtttgaatctatcgttacgtaaattataattggtatgcaaaattgttaaagtaaataaagaacttgatattaaacttcttcacgttgatttatcattaccttgttgagtatttgatttaccggtatcattactctgtccctctgcatctgttttagccttttgaaattcttgtaaatattcaatttcattcttaattctttccattgatctatagacttttgattgaacataaaatgatccacctttttcctttgaattgatatcaaacagatattcatattttttttgtgctttatctagacttaatccacttaaatcaacatctagaattttacatgcttcatctaatgttatatcaccatctcttgaagttgcacttgtctttttagcatttgaacctttttcacccttggttgcttgttgtgcagtagttgcagccgcagcttctttataagcctctgtaaaagctctaccaaatactttagtacctgtgaagataacttgtgctaataatctatgtgccatcgtttgttatctgtaagtttgaccaaatttgatatattataaaataattaatcatgagtagttcttaattcatgaaagagtcttttctctcagaagaaatttcaagaaattttaaattttccagaaagctcccgtcgcatcgtcgctgcttaggtaattcattactgattatgattatgtaatcataattttctatttactcgtataatataattttcactgcttttttacgatcgtatagtctgtaaattaaattaatcctaataatacagtctgagataggtaatattcactgttctttagagacaagtataagttattagaccgagagaaccactccgttatcaaccgtatatataagtcactctcccagctgtaaattagtcaaatagtatttattatactattaattacaaaatatcccacattaatcaaatctttactaaaagaattaaatattaaattgaatgtcacaaaattctataccaatgataccaacagattctcaagataatgaagctgcaggtttattgatgctgttttcaaatcaatcaaagagattaacttcaaatccagtatctgaatcaatacctaattcaactcaatcagtacctgtgattgtatcaccaccaaccgtacctattaatacacaaatatctaataaaccagtcgatcaaaatattcaaatgacacgacgtaattcttcaatacaaagagatcatcaattacaaaataattcttcattattagattcaatgactaaatctcctggtcctgcagctgctgctttagcaagtgagaatggttcaaataaagcaattgtagccgctgctgccttagctgctgctgctgcaactccaatacctattatacataaatcattacctgaaactggttttaaaatcaaaaaggaaaaggaagaagagaaagagaaagagaaagagaaagagaaaggaaaggaattcacagcaaataatgtattaaaacctggaatcagtttaaaatcagataataaccaaagggatgaaaaaagaggtagaagggaagaaagatcatcatcacaaaatacaaataataaaaggaaacataaagaatcaatagttgaacctactgtaccgtcatatgctgtaggaccagattcaggtattataagttgtatatgtggttatgatcatgatgatggattaacaattcaatgtgataaatgttttagatggcaacatttagtttgtatgggatttaaatcaattgatgatacacctgatgattttcaatgtaatttatgtaataaaaatttacatgttgatgaacaaaaggctaaaaaattacaattaaaatttttaaatgatgaaaaatctaagaagaaaagagattcaaatgaaaatgttaaagataatacaaaaaataatggaattatacaatttaagagaaagaaaactgatgataattcaaatgaaataatcggtgttaataaatataaatcattatattatccaattgattattatgttttcaaatcttcttcaattaaatcattaattaatcaattaccaattatattgaaaaagaataatgataaattaattccaatagttaaagttgataaattcggtttaaataaattaccaattaataataattatttaaatattaaaggaccaactgagaatgctaaggcaaaattttgtggaatttctaaattaggattattttctacaaagacaattaaagaaaatagttgtatatcattaatgacaggtgaaattgatacaaagccaaattatataatggataaagttaataaatattggatattaggatgtccaaaaccaagtgtttatttccatccaaatttgccaattgttattgatcaaagaggattaggaaattttacaagatttattaggaaatcatgtcaaccaaattgtgaaattaagacaataattagtaataaaaatgaaatctcatttggtatatttacaacaaaagaaattaaatctgaaattgaattaacattaccatgggaatgggatgataatcatccaatattaaaattaattaatgaagatgaagaaaattttgaaaatatgaatgattttaataatgatgataaaataactataataaattcaattttatcaatattagatttaactgaatgtgcatgttcaaattcttcatctacatgtattgttaataaaacaaaaaaatattcaacttatttacaaagaaattcaagaaagagtaatttttcaattatttcaccaactccaaatcaaaaacatataccaattgaacaaagatttattgaacgtgataattatattttaaattatattaaaaatagtaaaaatgaaaatgatgatggaaatggtaatgttagtgatgttaatgaagttgaaataaatggtgaagaaactaaagaagaaagagctcaaagtaataataataataaagatgaaattgtcattgatgatgaaaatgatggtgatgattcaaataagtttgtcttcaaggcaaagaagaaaagttctttatacaatcttcatattttaccaaagcaacttgaacttttgaaaaaatataacgaaattaatgataataataataatattaaagttaatttaaccaatataataattgataaacagaatggtgttagtagtggtagtgaagaaattattaatttaccaattccagttgaagtaaatcctgaagtgttgaaaaaaatagctcaaaaaactccaacagaaatgaatacatcaattgagaataaaaattcggaaactgaaaataaaaagtccgtggaaggcattgaagagaaacctaaaattgttaaacgttttagtttggcagattataaaaagaaaaaaactggttagatttacgtaaatttacaatttctttaataccttttgtaaaatttgaaaacagaaacaatgccaaaaataaagaaatacactgttgccaatgcctagagaaattggcaatagaaatagaaatggaaatagaaatagaaatggaaataggagaaagttctcgctgtgggttaactttaggagatgaatatgattcaaaaaaggaacaaacaaagcattgcaaaatttactccatttaatcatagggccctgacagttgaataagtatacggagttgaaattgagaaaagctaaggcatcatctgtagaaatttataataataattgtttaatattattatgtattatgtcaaaacgtcaaattttcaatggaaaataatttttccgaggcttaactgtaatggttgtgtattttatttcgatttcgatttttttgtggagtttatatgaaaatatattgaacattgactatacaaattattgtacaaagatatataaaagtaaaaagtaaaaaatagctgattaacgtagtaaagagtgataatatatataacaactgtgaaagtaactaattaagtaaacttttcactgaaatttgtcttgttgttggatgaattttaattgaatttttataattgatattattaatacttaagaatggaactttagattcagttgtagtgttacctaaaattgatgaattattattatatgggtatggtgataatcttggtgaggaaattggtgattcattatcacttgaatgtgttgaatctgaatacatttcaggttgtgatggtgatgatggtgccattattggacttgtaattggtgttgaagatcttaaagggtataatgatgaagtatttgaagatttcatttctgataatgcaacaactgcagctgctgctaatttatcagatttctttaactttcgtgatgcagtagaagtggaacttgcgaatgatgaggatgaagtaaatgtagttttctttaattcttcctcagttgggtaaatacatttaagattatttcttaaacaacctgaacaagcaggtttcctttcatcacatttcttctttctctttctacaacagaaacaaccagttttagttcttgtaatttttttcttttgctttacaatttgatttgttgaattaacagttgcaccagattcagtagataactttattgcagtaatatttgcattatttgcacaactcaaatcattattattatgagatgatacattacaagttgaatgttgttgtttcacttgattcttttgagataatgaagcgagattaataattttttgatattcacgataatttgccattttcaatttaacgataataaccttgaataaagaagtttgcaaactaaaggtaagaaaaaaaagagacatgcaataaattgtgaaaacttttaattctcttctcctccttaaatgacacatactaccacatcaacaatttcaaccaatttgtaaataataatagactcacaattgcacggacttggaacaaaatattttcctcaaaaattggaaaactcttctcatcactagggcgccttgcctatttaggtaatttctttctttccttctcctagccgcgctcaccttttcagcatctctttccgagacacaggtcgtctttttggccatttttcgctgttggcttcttttttggtatatgcctcttttttggtggtgttaatttcgctcttgatttccctgaaaaaaataggatgccttgccaaagtgaggatgagtcaataaatggatcatttttgcgtgtttaaaggaaacttataacgagtagttgcttttatttgatattgtctcaaaatggactgaaaaaagtgtcttgaaatggatacagtactttttgattacataataattgatatcactgtatagtaagtaggataaatacaaataattagaaataatagtaatagtaataatagtaaaaactttttaaactgtaataaaaataaatataaatataaataaactgtaaatgcaaataataatagtataataaaaaatagtagtataatatagaaaatataatatattataataatgtaataaaaattgtaataaaaatgtaatgcaaacttcaatcaagaagaagctaattcagtaaaatattgtcttaaaattaatgataacatttcaggtaattcattaatatgatgaacaacaacataaaattcaaatgggaatgtatccaaatatttagtaacttgtaatttcattttaccattatcatcagttgtataatttgcttggctcatatctaaaattgattcttgactatttaatccatcaataataacaaaaacaatcatgactttttcttctctagcttttctaactaatctttgaatagtttcatgatcttcacagacaccatcagataaaataatttgtaattgccataaatctgcatctccaaatgatcttgcttcattgaaaacttttaatgatttagaaattaattttttaatatcagttcttgtatcatcaaacttaaattctctaaaagcgttaatacctgaattattaccaaattgcttttcaaatggatgaacaacttcagcctttgtaccaaatttcataatagatatttgaccagattcaagttgtgataatgctttggaaactaatgcaacactctcaaatgcaatatcaactgcatgggattctgccatagatttagaatcatccaatgaaatcataatttgatattgtctcttacttggtttagttcttctcatccaaatcttatcctttctaaattgtgatgcaatatatggaataattctcttcatatttaatctcttacctgtcttataatcacctttcaatttagttgataatgtaggttctaaaattaatcttaattgttcgcataatgatgatgttaaatctctagttgattcatctgccttactccataattcttctgcctcttcatatggtctaacatttggctcattggtttcactttcaccaacaataccatcaatatcttcttcatctgataatgagtcttcagaatcaatatctatatccatatttaaattagttggaatttcatcaacttctctgttacgttcattcatgaatcctgaacgtttttcaccagcaaaatcatcattcatttcaccatcttccatgacaacatcctcgtcttcttcattcttggctaatttattttcagattcttcttcttccgctgttggtttattttcatcaacaacttcatcttcttcttcgtcatcaattgccatatcatcatcaatagattgaatttgatctttattagcagcacctaatgcttgagtagtctcttcagcattatcaccttctaaatgttggaattcatcaggtttttctcctgccttctgatcaaccatatcatcatctgttgcttctttgatttcttgtcttcttctatggaattcttttaatgaatcacctaattgtttcattgattcagctgcttgatctcttgatgattcattttgcttcagcattggtatcttcctctttctcttgattttcctcattttggaaatcagccccaccattgcttgcaccaatattatcattttcttcattggcatctgcatctgcaccatcagctttaacacctgactgttgcttaactgcagaatcatcatcaacttcattagcaccagattcggtaccttccaatccttcaatttcttcatcatcattcttatcttcttccatcttatcttcttcattcttattatcttcctctccttcttttaattcttcctcttcttcaactccaccttcttcattaataccttcattatcaacttccataccatcagtattttcctcttcttcttcagcattatcttcctcaccttcatcatcatcatcagctggggcaccttcaacttcttcattttcttcttctccatcgggttcttcattatccatttcaacatctgcattttctttatcatcacccttaccatcttcttcttctcccatatcatcatccatattatcttcaaatttatcatcaccctcttcttcttcatcagatttattgtcaccatcagaatctaaattaatatcatcaggtaattctaatgcatctgcttcaggtgctgtattatcaaattgttcgttttcctcattcttaacttcatcttcttgttctccaacatcttcctcttcaccattttcgtcattttctttttcttcttcatcccccttttcatcattattatcgtcttctggtttattattatcttcattttctttttgtttatcattttccttttgatcttcggcttcatcttccattgccttcatatcatcattttcttcagagttatcaggcatttcttcagattctttttccttactattagatgatgcttcttcatcccacatcttatcatcaactgcgttaggatccatatcatctaagtcatcaatttcctcatctaattcttcctcatctttatcttcatcatcttcctcatccttatcttcttgatctgaaacattttctaattcacctgccatatcaccttcaatatcaacagcatcatcattctcttcttcttctttatcgtccctatccttttcttcatttggttgttgtgcttgttcgcttaagtcctcgtcatcttcgacatcattagaattattttcagcaccttcaccatcacctaaaccggtaccatccttcaaattgttatcttctttctcatcacttggaggatcaggttgacagaaacctttggaacaaatagtatgcaacattgatgataattcaaatgaacctcttgaaatatcaatatattgagttttcaatttatgttcaataatttggacgaggttatagtagttttgaataattggtaaagtatgttcaataacagcagaagcaatagaggtttcagtttcattcaatttgagtgattgtaaaatagtgaaaatattatttaatttctttgaaactgaagctggatataatagatcaacaagtttatttaatttcttttgggaatcaattaaccagttcttatcatcatcttcttcattcatcttcattcttttcaataacttcaaaattgaatttgtgtaatctttgaatagagatcaaaatagcattaaataattcacggaatgactttttcaagatcttcaattgtaaataattcttgtttaacatcagtagctaagttgaattcaaaattttgaatacttaaccattcaagaataaagtcggcaacaaatgctgcttcgatattttcttccttccataaaactaaatttgtaacaaaatttttgtaaaagacgctaagttcctctacttgttgcatatcatcagaacctaaaacttggtaaattgaaattgaatatttattaatagtagatttagcattattgaaaaatgaactattatgagatttatttgtgaactgagaaattgttcttaatgtttcacatgcaaaatctaaaactgttggtgtttgttgaataaaattgatgatgtttttctttgaattttgtaatgttgataatttatcagctgataataatttattagagttgtatgtagtaaaagtttccaagtttgatagtttatcactcaatgattcgttaaattgactgaatctaactaaaacatgtctattcttgaccaaactaaagagtaagttttcagacgcacataaacatttttgagcatctccaggatgaatatctggatgaacttcagaaacggagagtctgagtcttggaagtaaatctaaaattctaaagaaaaaggtgtcacaacctctgaatgatgttggttctaaagaagttgaagtagctaaaacagcagtagcggttggtaaagctttttgaacatcaacagtcatatgtaatttcaaacccatttgtttcaaatctttaatagtattacttagcaacttatgcttttcgtttttcaatgaggcaataaccttcttattttccttagtataggactgaaggtgtttcctttcttaaactttcagcatcttcaataatttccttggcatattcatgtaaacttctaaatttaattgattttatatcagcaatataaatattcatattattttcaacttgagatatattctttaatctagagtttctttcattccatgtagaaatttgttgacataattcattgatttttgacatatcttctggtaatctaactaatttagattcaatatcaggtttgtcaatatgagttttaacagaagaagcaataccagattctaccaaaggtttaacaggtttaactaaacaatcacgatactttctaataatgttgtataatttatgatgagaacgacgagaactttgtttcaaagcatcaatattaacatccttccaacttgctaataagataatttcattgaccttcttttctaaatcttttttattgtaagcaatagcatcattaatttgaggaacaaattgtttataataatcaacaatattcattaatgagttgtagattggagaagttggaactaataatttaacatgtgttgcaaatgcacataaaagatctaatctgtagctaaactctccgtatgtagcttgtgatacaaaaatgttaatagcaccaatgattttaacttcaatttcttcatcaaaaacttcatcatttattgatggaacaataatactttcaaataggtgaaaccaccacttaccaattttcttttcaatgttattttcttcattgacaaaaacttgtttccaagaagctaattctaattgtctccaagacacaattaaactagaaacagatgcataatgaacctttaatgacacacctgaatgtgcatatttttcccattcagcaatgaaagtaaaaatttgttcgacttttgcaagtaaacggaaaattggtgttgatgctggatattcaaggaattcagaacaaattctaaatagatcagataatgttgcatgttctggccatttttgtaataattcgtgaacggaaatttgaacatttctaataactttaccagcagctcttgtttgagcaaaatcgtaaccattataaaaatcaatatcagatgaaggtttaacttgaacaaaatcattgtaagaatctttgagtaatgataaaataaaagttaagattgatccagtgttattacctgagcctgattttgcagaaatctttttaatagcgttaaatgtagttaatgaacttgtagagatatctttgaatgaggcagctgagtttggttgaaaatttaaaacataagccttagcaatgtgatagtaagtctcatttaaatcaatactagaagagtgagtctcagtagcacctacatccattaattcatcagagtctgggaataacttcttgaaatcttcttctgcatccattgtagggtcggagaacttaaaaacaccgctttcggtagattctttttcttgttctttcaacattctaagagaccacctatagtaaagcgccattaatattttattaaacgaatcatcagcactaccaacttcagtaggagttttgtaagttttagataaaagtaaaagatgagagtaaatgatttcaacattatgatcttcaactgatgatttcttacacatcttttgaacagaatcagtaactgaatcaatttttgttgttgagtaaagaaatgcggcatcagcagtccaaagagaggatggagttttaatttcatcaaccttgtgaccgtcatgtaataaatgtaaacctaatcttaaagcatgaatgaaaccaattaaaatgtcgtttaagtctgaaaatttcaaatggttttcctttaatctcaaaataaaatgagaagaattcttgataaagttgtcaatttgagaatcagctttatctgtaacttctttagcagtttcaagtaaaaattcaatatgttttttatccatgtatgaagagaaaaataagtgccattcttcaaataatctttcagctggttcagaatcacggaaaactcttggaatttcattaatattattttcaggaacatttggtaaatgattttctgcagtgataggagcatcagccagaaaatacagcacgagcttccataaatgagcttttgatatcattaacaacattttgtaatttaataaaatcattgtataaaatatgatcaatcgcagctggatcgtaagcagaattaggcatgtataacataataaaaccacatgatgtaagaatgaagcattcacccaaattcttcattgataaagctttctttgataataataaagctggaataaagtatgtaccaaaaacttcagcatacgcagaacaaccggattctgagaaaagtctttgatattcagataatgattcgtaagtaccatcagtgaacttgacattgacttcacctctaacttcctctttttcaatcaacgcagcatggatgtcatgcatatatttaatccattggataataatatcagaaaagtgtctaacattgtcagcaagaatatctggagattttttaatgatttgggaaataaaaaattttaagtcaaacaatgtttgttcaatattaccaccttgtgtcttttcaacttttgaaactaaatccattgaagatttaaaaaatttgtcgtcaaacaatggtatttctaaatcaccttctggtgaccataatgaatttaaaatttttggatatggtttaaatagttcagtcttttgataatcaactgaagaaatggtagttttattagatagtaaccataaagttaaagtttcgtggtctaataatggtgcttgttgattgtaagtttgattagcttcaacaaatccaagtaattctgcaaaattattagcaaatgaatgagctctttttgataagaaattggtggagattttagcaagatcttcaatcttatctttgataacttcaagcatggaaacaaaatcatcattttgagttttttctaaacatgcaccaaataattcaataaacatttttctgaattcattaacattgtttacattttctggaaattgttcaaacgcaacttcatcaaatcttgaagctaatttcattaatatttcgtagttctcccaagcaacagcagtttgaggataaattgatctacaagcattccaaatcaaagtcattgaggaacctctagtaagatgtaaatcttttgtgaattcagtaataataacacctagctcagaaattaaatttgcatcaaacttctccttttcgttttcataccatgaagaaagttgttcattgtaaaccctaatagcagtatgatttatagaagttgaagcagaaaccaaatttctccagataaatagaagatcaaataaagctctgaaaacattcatcattcttaaataattcattttcttttaaaagggctaaggtttggtttttgacaaatgttaaaatattaataacatacttgtagacattaagttttggaagtttcttgatttctctacctaaagataccgctgctagttgttctaatggattcaaaactgacgcattagcagtttttgctttttcagtgaagattattcattgaatcaaacgcatcggaaagaagtgaaatgacagtaaataagtaagaggtttcagtagaaattgcaaatggggcataatctaatactaatgagtgtaatgaagtattgacgattggtgataatggttgtttcttaacatcagaaaaccttgaattttgaaggtattgagaagattgttgaaccttttgataaatagtagaaattgagtcaataacccctgattctttcaaagtttcaaatttgttttgaatatcaataaaaaacttggtgttttgaaattcatagtaagtacatgcagatttagataaatcaaaaatcatatgaatcaaatcaattggaatgaattggaaaaaaactgaagatgcaaattggttgtttgaatcacacgctctgttgtagtagtctaagaataaagcaacggaaacagattcactatcattgacattaacataattagcaagtggtttacctggagatttcaattgtaataaatttaaagttttatcaatttcttcaacattttcgattgttggttgaatgtttaagatcgatttgtccaaagaagtggctctgttttctaacttatcaacaaatacttcaaccgatctatttctcatggctctagatagctcaccatatttaggatcagaagtcatgaataatctaaagttaggatgagttttaataacacgtggagaaccatcatcattggtacattcattaataatcaaagaaccattggtttcaagtaaagaatttaatctatccaaaacggatggattacaaagatttgcattatctaaaattaaccagtatcccttttcaactgcttcaacaaggagaccatcaaaccattcaaaattcacgttaatttcatttgactttaatgtcttcaaattattaattatagccttgatttcttcattaccgacagtctcatttaacagttctaattctttcaaaataaactcaagatttaaatgagtaatgctggattcgactaaagttttaattaatctggttgtagtttgacaaataatagaactttcagtggaagataattggaggttaatggcaataatatttaataaaagattgatgatttcagaggcgtatttagaaaatgttctagtgtaatctgcttgttcataaccacctaaaatatccatactatcaatatcactgttcatagaaaattcataaactttagaaccgataacatcagccgcaaatttaatcaaattagatttacctgatccggattcaccaactaaaattaatggatatgcatgttggatacaacggaaaatagtttcaagaattggaacatttgattggatgttggcaattttggaatcagattgatattgaatcaaatcgtttctatcaataattgtatgctggcattggatacaatcagattgaatgttatagaataaatcttttgtttcaactggaccaattaatctcttcaaataagtcaattgctttttgttgatctttagcagttctgaatctttgtttaacaactaaattaaagaagtctgaaggtgataattgtttggaaaagccttgtgcttcaactaatgataaccaacgaagagtatctcttaagttaaattcccatggtgcaccagaagacccccattgttttttaattacgacttgctcttctaacttggacatgaataaaatcattttatcacaaacatctttatctagttgaggatataaatgatgggcaatcaatttaagatcttcttcaataagcatatcaacgtagacaacactgaatctgttgataaatgatttaggtaaaccttttctaccaccaccttgtaattgaggattttgtgcagcaaaaactttaaagtttggatgactgacaaatgatttgtctaattcaggaatataaacttctcctctatgatctaaacaagcatttaaaccttctaaaactgattgagatgctaaattcatttcatcaagtaaaacccattcacctttttgcatagctcttaaatatggagcatctctccaaacaaactcaccggccttaccaccttcaacaggagaatcagaaccaaataagtcaattaaatcagtttgttcagataaattgatacgagttaaattattgccagttgcttgtgctaaagctgtgatcaatgaagttttaccaacaccaggactaccttctaataaaataggtttgtgaacttgaagtgctctaataactctcatagcattggatgcagtagttggtgcttctaaattaaatgatgtgatatctggtgcctcgttgcttctttctaaactaaatgggccacatctgagctttgagcctaatatttcaacagctgattgctctgaataaatttggataagatcgtgtttagcaaattcagataactttctaacatattcaagtttaacagctcttaagtttttcttcattttcagctaaatatgcagtagtgtgagtacctaatgcatcaatgaaaaccatacaagcaccgtgaagtaagcatgccattttttgaataccattatcataagcagtgttaatgaatgtaatccaagcaagaatatctcttaaggaaataacaccggatgaggcatcacctccacccatcttaacaccataccatttggaaaagtcgacaataacatctgttaagtccttgatatcatcatgaagcttagctctaacaatctgtctaacatcttcaaaatcttccatagatggaacccaaatttcagtaaaacgatttcttaatgcaggagataattcctttttaccgtaatccccaccgggattcattgttgctaaaaattgaaaaccttcttgtgcagtaatgaaaatatcatctgaacctttttcagctaataataaagatctttctggttctaaaactgagtttaatctttctaaaactgaatcatcagctaaagaaatttcatcaagtaaaaagtaactacctgttttgagagcattgactaaaggaccatcactccattcaaataaagcatcacattctgttttgactttgttcattttggttatgttttcttcagaaatactctcatttcccttgatagtattccaaaaagcgacagcatcggtatatgagatttgatcatcgatgacaatgtctgattcttgagcaagttccttcaaacattcaacaaatttgatttgaagttcggaacggtttctgataggtctttgtgcacctaataaatcaccagtttcagtattttgatgagcattaacaataattaaatttttgttaaatagttgagcaatcatttgacagacagtagttttaccacaaccagtttctccaaccaaaagaagtggttcattattttgcattgaagtaataaccaaaacagctaatcttctcattgcctttgtccagataacagggcctttaagttcaagtaattctttaacttctaatttagaatagtaatcactcatatcaagcttgactctcataactttttctaaagcttccttaacaacaagtttttcttctggtcttctaactctttctgctaataacatataaccattagcagctaattgttcataaccaacagcttcacgttgagcccacctgaaaagatctcttaaagtagcaaaagaattcttttgttcaaataatctaccaccttgcctggtgataccaagttccttatacacttcaacaatttttttagcatatgttggtgcaatcttacatctttctctaagaataatttcaagttcatcttgaggaatatcatcaaaatgtaattctaaaaatctatttctgaaagcttttgacaaaacttttctaccaccgtataacccgggtggattttgcgtagcaaataacataaagtcaggatgtggtctgactatttcttgtgtttctggaataaataattctctattatcgtctaataaacgatttaaagcttccaagacatctgttggggcaagatttaattcatctaaaacaatccaatgaccttttcttaaagcttcaactaaaataccttctttaaaaattaacttaccgctatcatcagagacatatgtacctaaatattcttgtaaatcggtgtgttcatggttattaatacggacaaatttgtgacccgttattttagcaagataattaatcatagatgttttacccgcagatgttggaccttggataagaactggaaacttaccaccactggtagcacggactaagtttaacatattcttttcaacaaaaggggtaataatataatgagcttgtggttctggttcttcaggacctttctgcatccaataatgtttgaattgaatatattgggtatctttagaagatggatcagcaggaatttgttttaaaacagatttttcattctttaattttccaacggtatattgatgaattaatggtaaaagaatcttttcagattttgcatctaataaggttaaaagtgacatacagaaaccttcatataatgatcttcttaaaccgtaaatagaagcaatatcacgagcatataataaagttctagttagtgtacgaatactgaaatgtggtttttgatttgcaccatcaacaatttgattcgattcggaaagtttctttgctgctaaatacaactctgcaatatcattaccaatccattcatcagaaagggaatatttaccaatatatttgtcaataatcattaataaatcttcaatatcttgatctggagaagcaacataaatttcactaaatctggatcttatactttgaggtaaatctttcttaccaacatcagttgcagggttcatacaaccaaagatacggaaatcaggatgtgctctaatactttcaacatcacccttttctgataaaagaacacttctttgagattgatattcagctaaaagatctgatatactatcaagggtttctggtgctgctaaattcatttcatctaataataaccaatcaccttttttaactgcattgactaaagaaccttctacaaatttgaaaatgaaggagttattcatatcaataacttgtttttcaaaattgattactcttgcttgcatggatttccattctttcattaattcagttttttcatacgcattcagctttctcttctttttctttgcaggttcatcatcattttcagcagcttcagtattttcagtttcttccttttcgaatgtatttttagccattttataagcttctttccataatctacaaacatttttccattgagatttgttaaaacattttgataaaagttttaagaattgtgcattatttttagttgagaaagatcttgcaaataactgttcaaaatcttcttctaatggtaaagcaattgtctttgcattaattggtttgaagccaccaagtaaatcaccgacttcggtttgttgagataagttgatgacagttaattttttattaagaagttttgccatttgttgaacgacagtagttttaccggtacctgtttcaccaacaagtaaaagcggttcacacattgaaatacctacaccgattttttccatcaatctagctgaatggttagttgttgcaaatgaagtggaattaccaatagcaactttattgttatatttatgaacaccgataatcttttgtttctcaacataagcacgaccaactctgatggaatcatcaaaattttcaaaaaccggaacatttctaagaagttgtaactgtattcttgaagttggaatttctaatgattgaccaatatcttggattaagaattcaattggacctttttcaacgattgcacttgtaaaacaatctattgcttcttgaaaaattaaatcaaatacttcatcttgaatcatatcatcagatgatttaatatcatgtagtttgaaaatttgttcacttcttctacagaatttcattaaatctctgattgaaatttctcttggttgagcacctttattcattgaaacaaatttacgagaatcgcaaattttcttaacagcaaaataacatttaataaataaattcgtataacgacttaacaatgggaattttttatttaaaatggtctttaaatcagattcttctagatcttgaacagttaaaatattccataaacgtaaaccaattatttcaggtaaatgaatctcaccctttttatcaggtactgatctgattgttgagataagttggaaaccattagcagctttcaaaacttcacctcttgaaggtaaagtaatttcacgatgttcaagtaaacccattaaaattgataaaacttcatttggtgccttatcaatatcttcaattaaaacccatttaccttctttaacagcggttgttaaaacaccatttttccactcgaaagtacctggtttagaacctgatgtataagtacctaataatgttttggagtcagtttgttgattaagatggattttaacaagactgttagtttcttcaatatgtaatctctttgccatttcatcgactaaaaatgttttaccacttcctgcactaccaaccaataaaacgggacttgaatttttactaaatttagcaaaatctcttaatgcatcaattgattttggaacatcaacaaaattagattcataattagtaaaatttacattagatttaagagatatcaaatttggaaccattataccggatataacactaacacccggagataagtcattttcagtaaatgtaattgttgaattagtttctttgaagcagtaatctgcaggttgaatcttggataagtttgataatctttgtgcttcaaataaggtaatgtatttaaaattaacatttttatcaccatccaaagttccaactaaatttgaagtattgacatgttgttgaatcatttgatttttagcttcctctgaaagaaagaaatatgtggataaaattaatgaagtaatatatttatttatatcattagaagattcttgtgagagaattgaatgtaaaacttgtgcatcaataaatgaataaaatttttgtctatcaaggttaattaatctataaaatgccaatagtaaaatttgtaattcatcttgagagatagaagctaaacagtttttcattagaatggaagaaatccttggattttaagaaatgttcaactaagattgcaatttcttgagtgtaagtcataattagtgctaaacttgataaagtttgagaaccttcaataacatgatgtaaattattttcctttaagtaaagtctttcaatttcttgactgtgaatcaatcttgcgacaagttctataataattggtttaaagctaaataaatcgcatgtagttgcattgttgtttaataaatgtgtacttaattgtattaaattttcttgatttgataatgctttgttaaaattgttaaatgcaggtaagcatttctttgaataaaattgttgaaagtttctatgaacttccaatgactgtttaaagtcaacaataatcgagtttccagttgatggacattattcaatgaactatatgtaaaagttagtaatttgttttctattttccccaaacgtgaaaaattttggatattaaagtttaaataaaattttatacgtacttcaacaataaaaccgactaataagataacaaaaattaagacagcaattaaaattggttatttgttgtcaaaataaagtttgttttgttcaattaagatgtataaaaaggggtatattagaaacctataaagtagataataaataatgcatcaaaccgatcttctctattaagaaaaaaaatttgcatgaaaaaaaaaatttttggtgtgcacagtgattatgtcatcactagacatgtctactattactctagatcattgaccatcttctccacgttccttagtccagttggcatcaccgctttggcgtggtagtaaatcatccttggtggttgcagctttgattttctttttctctgctgttttctctgctgttttcttagcatcagagactaagctggatgtcaatctcatgaactcattacgatcaatagttaccaatttagtggcattagtaatagctaatacggcttgaagatgtttatcctgttctttgtctattgccaatctcatttcaggtttatctggatttatatacttatcagttacatcaataatgtatcgattgttagctgcgaaaacatatgacattttcttaccccatccatcacaatataacattggttgatcatatgaattctcgcatgaatctaaatggatccatctaccttgtttcctactaaaatactcacaccaaacatgatcttccatatttctaatataacgtgattcaatatccaatgaacgtaaaatagagagaaagcaattattccattctccacatctacctctacgcttcccttattaatgtttcagctttattatatcttgcaaacacaattggtgcattacattttaagcatttatagatctcaacaactgatgcccacccttcaaggtgttcctttctaaatgcttttcttgcctgcagtcttctaattttattttgatcactattaccacacttgtcacacggtggtttattaacccaggtaaagaattcttccttaaaccatctaagaagttccttcactaaatgatcaacataatccagttcatcatcttcttcacattctttctccttaagggcagcacgatgatgaacatctgttgctaaaacggcatccagacaagcattcttatctgcatccgataatctataaaatgccaattctgtttttaaaatgtcttggataaatggatatttttgtgcttgttttattgttggtttgtcagttataacatttttgtaaacttctgataaaaaagtaattctccctttatatagtgtacttggaaaacgatttgctaatctcagcattttagtacgtttttcatctggttgttgtttgaatgtagtcatgcctacaaagcaatgtagtgtgttgtgctcagagttgaaaggaagaaataagtggttgtagatcaaagcatccctctaagttaacggcaaccgccccatgaaatcatcccaagccgcgttacgccgactttttatctgtaaaacttcccccattattcatgctttcttcaacaagtcgtcaagtgaaaaggtacgtaggagcagttgctggaactgatatatatatacggaataataatgacagttgggaatagaggaaggataaaacttgtgaatggttttgcaaataatggaaaagaatcaaaaatgaagaatttagattttgatattctaagtcccactgaaacaacagcaattgatgatgatgatgatgatgaatgtgatgataataacgatgatggtgttaggtgccaatactctgaaaatctgaaaattatcggatattcgattattatattaacttgggtattttttgtgatatccataggtacgatcctcaatgtatggcaatggtgtttcaaaatacgacctggttatatacaacaattacaagaaatacccatattaggagtgatagtcaataagattattgaacaaaatcaagttttggataactactatatgtttgcaattatactaaactttgtcatattatggatttgggcagtagcttcatggattagtatgaagcttttcagacatagtaaaggtggtggttcataaaatcatttaaatcgttctatattatatatttacaagtattctataatttctatatattcatatattcataaattcataaattcatcaaaagttttctaaatagcttttacgacgtagaactttttaccagcttttaatagtaataacttatcttcaattaaatcatctgcctttatgctatagtctgaatctgtgatctttccctctttggtattgccgatgtaaatagatccacctttgatcattctcttaagttcagactttgatttttcaccaccactaacttcgtgtagtatattgacaatatttgtactaaataattgttccttacttaaatttttaacaagattttgctttgcaaaggcatccaatacatcatcagctttgaaattacctctaatatcatttctactaaataaaatctcactgataatgtaattacttaagccttcaccatctccatgaatcaaatcacacatttcgaattgctaatattctttgacctaatctaacttttttgtctgtattatgaagatcaataattttatcaataatagtagttggcagtaaggaaaacttgtacataaattttttaatgtcttcatctgtagtattatacatgaattgataaacatcatatgaagatgtaagttctttatcaatgaaaattgcattacctgcacttttaccaaatttgacaccatttgatgtagttagtaatggtacagttaaaccataaacttcattttcaaactttgattcttcaactttcctcattctattaattaaatcaacaccagcaactatattaccatattgatcattaccaccaacttgaatatcaatattaaaagttttattcaaataataaaaatcatatgcttgtaaaatttgatatgtaaattcattaaatccaataccttgttctgatgttaatctattcttaattgattctctactaagcatttgattaactctaatatgtttaccataaattgctaaaaattcaagcatacccatattttgccaccattctttgttatttttcaattcttgactacctatttgtaaattattaatctctggatttctagttttaccatatttaatagcattgatgaaaaaatttaaaaattgttgagatatacgttcaatatgatcttttctaatatcatctctcatacttgatctttcagttgatctacctgatggatcaccaacttcacctgttgcacctccaatcaatgggtaaattctatgaccacgtaaattaaaatggagtaataccatcaatggtaagagattacctaaatgtaatgacttagcagttggatctgcaccacaatataatcctaatgatttagtttcaacgtctttacttaattgttcttcgttaacacatgtttcaattaaacctctttttctaagatgtgaaattaatggttccttgaaatcagtgttttaaatcatcttccgttatctcaatattatgttttgtcaaaatatcagaaattgaaggtgaaattcttgtaatgtttcttctgaaaactgatgcaaaaacaatattctgtgttcttttaatactgtgtatacttctatatctaagcattgtattagtcaacaaaactcactatcaaatcacaaaagaatctataattgttgatgtgcatgatttcactataatacttagtccttgatgttgaaaagctaaatattttgttacgtaatctctaacattattattacaaggtttaatttaatgttctattttatacaaaattataattaaatactaaattaattatctaaatgatttaagaagctattttcttagcagatggttcatccgttatatttgaaatttcagttttagtttcagtttctaattttctcttcttgtcatttaataattttgttgttcctttgtttgttcaacaactttatccaatgcttccttcattacatcttttccatttacaccatcaactttcctgaaaaatggttgtaatctccagtatggaacttcacgatatttaccaccccatagttgtaattcgcctattttaattgtatctaattcatcaatattttcctttttgaaaatttcttcaacaatttcttccatcataattataactttttcaatttcttcaaatgatgaatttttatttaattttgcaatctcacttctaacatttgtatgatatggtaagaatgttttcaaacttttgaacatatgagttttcatacatctcttagattctgtacctttacatgatttaacaacttcaaaatattctctcatgaatttatcaactcttgggaaaagtttgtctttatcatcagttttagtccaaaatacacctggattacttaaatttgcttctgcactcataactgcatcacaaccaatttctttaatacatctatcaatatcatcaggatataaaatattaccatttgatatgaaaactgtaccttcaggtaaattttctcttaaatatttaattaaattccaatttgctaaaccagtaaattgacctttcatttctcttgttctaccatgaactgttagaaattttgcacctgcctttaaacataattttgcatactctaaagattttgaccaatcatcataaactctaattttagctgtaacgggtaatgtatcctttaattcgactgctaatttattaattaatttataaactaaatcccattcttccattaaaaatgatccataatgacctttctttgcaataccttgaggacaaccaaaattaatatcaacagcatcacatttaccaacaacatatttggcagcatctaataaaatatctggatcatttgcacaaaattggattattaatggtctatcaatttctggattaccatccatttcacataaaaattgatccctaaattttttatcttgactaaataatcttgaatgtaacattggtgaataacataattcagctccatatcttcttgacattattctccatccaagttcggatccatcaaccattggtgcaacaattttagttggtttacccaatttattaaataattcacgacctgatttaatagattcttcaatatctatagtatcatttataaatgaatctgtttcaacttttgtcatgatatttttacttattgatattgatgatggtttaaatgtatttctgaagtatttaacagcagaacttaataatttcatatgcttacatgaaaacaagtatttaccccattaactgtaaactttgaaaaaaaaattatttcatggagaagtccgactccaatagaaaaaaagaaaaggaatagaaaattacgtaatcgtcaacggtttatcttaatgtaggacatagtggggggtatcttggaaggtttactgtttagaacattcctttttatcggtttaagacagggtacagccactatgtgatgttgttttaatggtgttatgtgtagcttatgtagaaacttaatcaaaacatagtaaaactgttttgtagaaatttgtaaaaattaacaactttaaataattttaatttacaaaaagtatcttcaactaaataacaaatggttatgaaacttaatttgaaataaccttttttttacatttaaacaatagtgcatacaaaatagcatccatataatcaattacaatattattatacagtgaaatcactcatctaactaacaataaattaacttattaaccaatcacaacatatttttctgtcatggcagttgagccaccttaagattatgaaaaaaaaaaatgtttcgaagtaatacatagaatacattaaattatacaacgaaattacaaaaatttattttgataaattattctcaggactccaaagagaggtattttgatgaatattaattgctcttgcctttaaagcttctgcaaataataatgcaactggccaaactggtgcatcagctaaaattctaacacctaatgataaacatctttgacttaatttaccacttacaataatttgtgcaattggttttaaatctccaggttctaatgctaatcttgcaatttcatcatctaaaatatcaacatccagagcaccatttgcttgcattcttaaaaattctgaatatgattgattatttgaacctaaaggtaataaattttgttcaatttttttaaaaattttttcagctcttaaccataaaactctatcacttgttgttaaattattattattattatttgaatttaaatatttatgagcccacgcttcagttgtatataaatattcagaaattaataatgttgaagtaaataaacatgtaaggaaaaaaattggtgttctaattgaagttttctctgcatcattattaattgaaataatttcaatccataaattaattatatctaatgaataattaattgaatctcttaaagcttcaatatcacgatttaaattttgaatttcattattcattaattcccaatctttattccaaacatgatttaaaatacctgaaatataaacacatttattaattttagcaaatgaaagtaatggtaaaattaattttaatattgaactattattaattatatgaatattttgacctcttggaactaataaaccaccatttttaatataattactttcccaaatttttattaatgattcaatatatggtctttgttccattctccattgagctaattttgcaccatatgatttattattttccttttgatttttctcagattcactatgaataaattcatttaatgttaataataatgataacatacctcttaaaccaatttctttatctaatgataaattttgtaaatttctaaataattctttatatggtaatccattacttaacataattaaagaaaatttagaatttataattaaattcttttcttttaaaattagaatccattcattaaaatttttacaattccataattcatcaaattgacaaggtgaaccacattccatattttcaaatgataattgaatatttgaattatttaaaataccaaataaaactgttatataatgtaatacatgaattgttctaattcttgattgtgataaaataaaatatttaaaacatgaatcaactaattcaaaattatttaaaaatgttaaatctgaattaatatttggtggtaataataaactttctaatggcatatctaatttagttgttttaattaatgaaactaatgaatttaattgtcttgaaattaatttagtaatttcttgatcattatgaaacatacctaaaaacatgtgtaaaactaatgattgagttatatgtaatggtatatcagtaaatttatgtaattttaattgaacttccataaaattatgaattaaaaatcttgaaaaattgaataatgttgaagaatttctagcatgaaatgaatataatgcaccaactgctgccattgataaaagtaatggaatttgatctaaattttcatcaattttaaatgatggtatatgaataaatggaaaatatttattaaattcaatttcataaagtgctaaataatgattaagatcatctaattgaggaaattgttgttctgataaattatatttttccattatatgatttctaattgattctgaacatctaccaggaattgttggattttgataagtatgtggtatatgttttgataaatcaatttgtcttgatctaaacaatttttttaaatcatttgtacttgaaggagaataactatttaaattttctgataataaattttgattatttaataaattatttgatgtattaattgataatgaaggtgaatcaacaacttgattgttattaatattattaatattattattaatattattggtatgtggactatcagtgaaaccaatatgatcagaaacatttgggaaattagtttcaattggagcatttataaattcattaaaccattcagtatcagatggatgagttaaaactttttctaaaattgtactaggttcaggatgtgataaaactttttgtaatgcataatctgaatttggatgtgataaaactttttgtaatgcttcacctgaacgtggatgtgataaaactttttgtaatgcaacaccattttgaggatttgataaaactttttgtaaattaatatctcttggactcataccattattactttgattactttcacttcttgtttcatctttaatatctttatcattattagaagtttcatcaatagagttattattatgattattactattataagttgaattagttaaatcagatgtaaaattaaatgttgagaaatccagtcctaaatcatttaaatttaaattatctaataaatcaagatcaacataacctaattcaaaatttggtctatactttaattgaggtgaagaaaatgaaacttgttgaggtgcttctttctctaattcttcaatatttttagcatgaggagttttagtatcaggaaatccagtatatgaagaggaagcagcagctgagaatgaagcatgtctttgttttctataatttgaagattttgaatcattaagtgtattagttgtaatattattattattattaatattattattataatcaaattcatttgaatacattgcttgaggattatcaaaatcattattttcactatctaaatcagaatccagttcatcagaattaagattatcatcatttaatgaataaggatttgaatcaggatttgcattacttttattttgactttctggtgttatatttgaattagtaaagatattgttatttatgttgttattattattattattattgttattcattgctgattgattatttaataaatctggagagaatattaaaccattaattgaatttggtgaattatagataccattattattacctaataaataagacatttgatcattttggaaattaattcccatatttaaattattaatattcatattcatattcatattcataccataattcatttcattactattcattaaattttgaaatgatttatcattaattgttgtatcattgttattagtgttattttctttaatatttttaggaatttttgaattattatcagaattaggtgaaattgaagaatggttatcagttgtattacttataattgagaattgactttcatttttttcattatccattaatgattttggattattaataactggtaatttagcacttgtattatttcgtactatattaatattatcatttaaatgatctctaataatttcaccatcttgactatcatatttttgtaatttaccctttctttgaatatttgaacgattattagttggtagggaggcatgtaatttttgttgatgtcttaaaactaaatctctacgagcaaagcaacgaccacaagcagcacattggaaaggtttttcatttgtatgagatctttcatgtctttttaaatgttctaatcttgcaaaagctcttgtacaaattgaacaaacatgaggtcttggtttatttgaagataatttattagttgatttagttgatttagttgatgcaacttttttcaaaggtacaccaaattcattattatttaaagaattaacatcaaatattatttcaccagataatttattatcatcatcatcagttgggaaaactctttttgaatttggttcatttttagttaaaggtgattgtattggattcttttcagtcattttttaaagttatgcgtgtgtgtgagtgtgtgagtgtgtgtgtgtgtgtgtgtgtgtgtgtgtgtgtatataaaacaggggggtataagtatatttaagtgtgaactacacgtgtattgtatgtaccagcactaatataagataggaatataagataggaatatagtattaaaataaaattcaagagaatagtagagatgagccaaatgaaatgaaatgagtgagcctataaggattaaaggatgaagtttaaactaaaaagtgaaaagttaaaaataaagattcagaatagattagattaataatattataataataataatgaaacagcttaaaaaaaagaaaaaaaactggaaaaatgcttgagtatttgttattaatgaggaaaacgatgatggtttttttttaataatgtgggaaaagcggaaatagctgttgtataattggctttgtctcttattagttgttgttagttattgtgcttgtattataaatgtaatataatataatatagttgattgtaactctagtaaaacgcagtgatacattaatattaataatgatattaattaataataaaacagaataaattaatgagccttaatattaatattattaatattaatactaatactaatactaatactaaattattattacacggctgtttaattttaattttcattcaattttcattcaatttttatcggactcctaaaatttttattattttggtattattttattaccacattacgtaatatacctttaattaccgacgcaccgacgccaaatcacgtgcaccggatataaaatttattttatttttcaatttacggagataatcttttaaacgaaattccgcgtaaatattaatattagcatttaaaactaaaattaatataacacgtaatttgctagtatattacttagtaagccttatatttattgatatatcacagaacttattctatatttcattctaatcttatcaatcatttttatttcatttatttgttatctatttcttatctattatttgatccaatcatcaataatgttaagagctttaggattctcatctcaatctctttcacaagatgaaattaatgaaaaaatatcaattcaagctttacaattagagaaagctttaaaggcaatggattatgttcttgatgatagatcaaatgaagcttttaaattattaattgatcatgaaaatattgctatctctcaattagcttatggtgttgttcaattcttagaggcaactttaggttttgaacctgaaacaatgaaaaaagcttcagaaactttatcaaaggctgaatcaatgtcttggaaggagaaaacttttgctgaaaataataaaattaaaacttctaaaatttatcctcctggaactgaatttgctgttgcctatgctgaatcaaatttacttaatgctttattaatgttattaagtgaaaattttattgaaggtgcaaaagctttattaaaattaagaagagcttatcaaactttagattcaatcagtaaaaattttaaaaataatactgatatttcatcaattgtatctcaaacacctaccacaaacttcatcttcttcatcttcttatcatcttctaatgataaatcattatcctctttaacatctgctgatttaattaatttgaaaagttatcaagattgtatcaaaaataaagttaaattcccagatttaccattacctcaatcaaatcaagaaatgaaagatcaatcaattattgataatttagagaaaacttatcatatgcgtttaggagagaattaatggttctcatattggtaatccaccagtttcaaattctcttagatctaaattaggttttgatagtgaagatgatgatatcaaatcttcaaataactataccaaaatatggtaatccacaaatctcatccgtcgatgaatatattcattcaggtgttaatttatgtttcggtattttacaagtagttttatctcttatacctcctggaattggtaaagttctatcagttgttggttttaaaggttcaagagaggcaggtttacaaatggtttggaatgcagctgaggaacgtaatattcatggtggtattggtttattagctttattagttttctatgatggcccatttcaatttactgatgtcgattttgatataccttcatcattagaattaagtaaaaataattcaaaggctgatttatcaagtgaaattgaaaaaattaaaactaataattcaaataaagaaataattgaagaaaaattaaaacttgaaaaaatggcaactttaggtcaaactgaaactttacttcatcctggtgaaaaattagttaaagttttattacattcaagagctttattccctcatagtaatttatggttattacaagaatcaagaatgttagcttcaagaggtaaattattagaagctgttaaattaatggattctgctaaaccttcacaaatgaaacaagttgatgcattattaggttttgataaatcaatgattttaatttttttacaacaatttgatagagcaggtgaagaatttctaaaattaattaaaattaattcatattctcatgctttatatacttggttttcaggtgcttgttatttagaagcttatagaatgtgtaaatcaaatattaaaacttcaaatagtgatgtggattttaataaaattaatgaatatagtgaaaaggctgataaatatttaaatatggcacctgatttaattggtaaaaagaaatttttatctaaaataccaccatttgaaaaatttattgctagaaaatataaagaattaaaagaaactcatttaaagaatccaaatttaaaatttattgattgtgttcaaacttcacttgtttatgaattagcttatttttggaatggttataatagaatgtcaactgaagtacttacttcaactatttcattattaggttattcagcaactgattcatctaatatatcaaattttttatcatcattatcaattcattctaaatcttctacaatttcatcattatcatcttcattaccatcaccaatttctttatcacttgttaataatgataatttatcatatgctaaaatacctgaaaataatgaacaaaaaatgattagaattacattacaatcaattgcattaagaagattaggttatattaaggaaggtttacaaattttcgataaatttgtcattagtcaaataattttaaaagatggtaaaatcagtaaacttaatgcaaatccttatttatacccaactgcattatatgaacgtgcattatttacttggaaattaaatggtattgatggtttaaaagattgtatgaaatggttaaaattaagtcaatcttatggtggtgatgattatgaattaagtacaagagttacaatgaaaacaaaggcagctgttgatagattagaagatttaaattactaatctgattaatctttctactttttttaatgacaattcttttaacgatacatttttttttacctatatttacttttaaatttatacatttttaacattttactattattcccctcttatttttttttcaaaacaagtaaaataaaataccttcaactaagaagaaaagatacattgctaaattagttgattgaagtttaaatccacttgaaacaaattcattatcatcttctgaaaggaaaatattaccatcacgatatttaattatatcattctttaaaattcttgaatctaattcaccatttaataatgattgtaacattctagcccttcttaatgcattggattttaaccattccttttgttccctagttttagcatattttgtaggatccatattttcaaataaatctttacccatatcatcatatgaacttaataattcttgaatttcttcattttcttcatcattatcattctcttcatcttcagttttataattttcaaaatcatcaaagttactaccaaatgctgtgactttcttattataatcatttctatttttggtaacaacttcatcatctctatcaagatcaaaatctttatatgttaatccattagatctttgtaaaatatttgatgcatcttccttttcccaatatgtaataacatcacttaacagattttggaaactttccaattcctcatctggtatattggcaaaatttggttgggatatatcaccttttgtattagttttagtatttgaatttgtactttgttttttattacccttaggttttgaattaaaattaccatattgtttatcattatcagatttttcattatcatcacaatcatcttcaacaataggctttttgggagtttcacactcatcatcattacctttcattttcttaatttttttcaatagtttttgaaatttattacaatcagaggttgctaaaaaccctgcccatttttctttacccatttcaagataatgatccattatatcctttaattcttcagtatcaacttgataaactattggtctaccatcattttcataaaattgatcatcataatcaggtactggtccagtaacaggtatatcaatttttttatccttcaaacctaattttttctgtaatcttttaaatgcataactattaacagctaaagattctgtatcgtcattattgtcatcattagaaatgttatcattaccatcaattatttcatcagtctcaccattattattgttactaatattatcatcaaaagaatcatcatttttaacatttttattatttttcttattatttttaatatttgtgactgtcttagattttgcccttgaataagaaacaggacttcttttttcaatatttaatgaattaaatgcataattatttatgatatctttattttctttacttaaaataatttgtggattatgttgttttgcatattctgtactcattgcatttattgttgatgtactaaataacatcattggtaatacatagcaaagtttaaccatctttgattatctacaaaggattgtttgataaaaagagatcatataggggtacatgttccaaaaatgaaaataaaaaaattaccccatattaataaattgccctgtactgagaaaaaggtgtttttttttcattgaaataaactatcaatatcaatacccattggatccattgatttgaagaagttttccatattaaaattattcaatgcatcaccaaacaattcatcattatcaagtgttggattatttactaaaatatcataatctggaatattattattgttattattaatattattattgatgtcataattattattattttcattgttattatcaattctaataaatgaacctcttctaggtgacaaattattttgtgaataatcattattattttgttctgcatattttgcaaatagtcttgcaaaccattttctatcatcctcagaaatcaatgtgttggtattgttattaatactattattgttattaaaacagttatttgaatccaaattagtattattagtactaccattactttcatcacttgtagtattaacactactaacagataaatcatcatctaaattaatcaattgatcattttcattagtaggtttaaaatgtttgatttcttcaatccattcatcaaaccaaggttgattagttgcattaatttcataatttttccaatttgtaatttgaattaatttccaaactttttcaacatctaaaaattcaaaataattgaataaatttttatatcttgaatagtcatgtaattcattttttaaagttttaacaagaaatgtattaacttttaacattctccatgcataaaaatattttttcgataatatttttagtgatggtatataaactttttgaattatacctaaaattatactatttttgtaatattgtaaaagttgaatcattttattattatattcattatctttattattttcattttcattctcattctcaattttattattattttcttccttatatttgatttcaagtacatttgctttaataaatgatgaaataaagaaatctaaatttttatgcataaaagtttcaattacagtcaccaaaaatatatcaaatccagaactgaaaaatttctcacttgatttaactaatgacaatatattaccaaaaacgtacatagtttcacttaaaatttttagatgaatataatgacatatatctatttttgatttaatttgatattcacttaaaacatgcattaaaattgattgtaaaagtgttaaaacattaatataaatgattaaatttgaaatttttctaatattatcataatgattaaaacattttcttgataaaatattattaaatgaaccaaatctagtataaagttcagttagtaaatcacaaattttagagaaaattacttcaattttgggattttctttcatatctaaaataattttagttaatgacatcattttttgttcaattaaaaattttgtttcaatcatttcaattgtaattttttcgatatctaaatttaaattatttgaaattgatacattaaattttggtaattttgtatcaaaaaatttattatcaatttgtggtatataacttgctagagttgtttgatgattatcagctgctactaaaccataccaaatttttcttttcaattgtgataatctatcatcagtttcaatatctttattattaatattattactattagttattggatctctatttaatcccatcattgttgccatttgaattaataaacttgtataagtttgggaatcaccatcagcaaaagcatcacaaccattccttttttgatattctcttaataaaattgcacattgtaaaacaggtaatgaacatcttttgaaaagacaaaattcatcaagacataattgtgcataatcaataattttatctgataaagtaatattaattaatgaacattcatcatttgatggatttagaattggtgcaccattatttgaatataacgttaatgaagataatttaataacagttagaagagaaccaattatggctaagtcatttttatcagtaattttaaaatcatttatatttacattttcatttgataatctatctttttgataatttatatttaaaattctttcaatatcattaataaacatttgattatcaagatatggagcaaatggataaatataattgaaaaatctttcaatagataaacaaattaccatctttgaaggtaaaatttgataaattgattttaataaagaatctttagatactaaaattgaattaactgaacgagttgaaattggtctttgaattgaaaaagttttaggtattttagtatactgaaataaggggaaattatttttattattttcaacaacccatttacacattaatgaaacaaaaggatcttttaaaacagcagtcattggaactaatggaccataattattaatattttgattaataaaaggtatatttaatataccatcataaatatgaatttcatctgaggggtcaacattaagtttatttaataagtttaagatgacatatgaggttttagttgaagatgtatttaaactgttagtatcattattagtaatattattattattattattataattattcaatgaagaaatttgagattccaaatatttaattttatcatttaaacgttgtatctcggtggtattaatttcaatagaatcaacatctgaaccattttccaccttacttggaatatcaatatcaatatcaatatcagtatcactattactattaccatttgtcgttatatcattaattttaaagaaagtacaatttttcaaaccatgagcttgacaaattttacaaattggctttgaacgatcacatttaatttttttccttctacaatttgagcaagaaagaggtattctatttctcttttgatgatttttatttatacttgaaatagtcggcatgtaataggcatttatttgtattgatttccagaaaagaaagtaagaagtagtaaagtgaaaaataaattcggcttagtaaagcactagtagtgaaaaattgagttttcctcaccattaagaattatactatagcttgtggagaaaggtcttttccttaataataagtaagtatagtataaagactatgagtgatggtgtagagaatagaggcaataatggaagtgataacaaggtaagagatatcaaagtagtgtatgaatgtatcagacagatgttatcattggatacagatctagttatagaggaattagatatgatgaaagaggttaatgatgcaattataactagatatagagatttaaatagttatagtgaagaaatgtatcaatacagtaatgaatataatgataataacgtatcattagacactaatacattacaattattagagaatagagttgataaattgttgttaacagtagaggaaatggaggaatggtctcatgaaatggaggtaaaatttaatagagtgagaaattgataatttgataaattttggctttttttcacatgtcttttattatcttttaattacttcttcttctttcttttcttttcttttgggcaaacaaatgactagtcgacgattaccactaaagatagatgatctattagacaataatatgaaagagggaagcacaaataacaaagttaatgatgatgatataatattagcagttaatgcattagaaaaattaaaacaagataattctaataattataatcataatcataatcatactccttcaagatcagcttctcccgttataacacttaaacctacaactatattcgataaagttatatctcatccacttatatcgaattccattaattatgttttggagaaaactatcaatacttcatctaataatattattatcaatactagtagtgaaaataatgataataataataatattgatagtgccactacaccatgtgaaaaaaatttagttgataaaaaaatttctttacctccattaaattcaataactaataaacttccatcactaaagagatcaagagatgatgatgatgatggtagtgatgttgatgttcatgttgatgatgataatactaataaacctgttgatccccttactgttaaaagaataaaaactgccaataataatactaataataataccctgagaaaaaaagtttcaattaattctgcattatcagctcaaaaatcattagatgatcttaaacaactatcaacacttaatttaaatattgaaagtaggaaaaaattaacaatgttaatacaatttcttaaattaggtaatactcaattaagtgaaaggattgataaattaattgaaaatgttgataataaacgtaataaaattatgtcaaataatattactagtacttccacttcatctgatataaatattcaacaaattaagaatgaaattattacaactgttaaaaaaattgtcaatgttgtttcaacagtttcagctcaatcattaactgaacctgcaagatcaaatgtacgtgatgcaattttaaaattacctacaaattgggctaaaatgttaaataatgagattaatgaaggtaatgatagtgatagtgatagtaatgatgataatactgatgataatactgacgatactgatgatgatgatgatgaatatgaagattctaatgaaaatatagtgaatgagaacgatgatttggaagatgaaaaaattgaaaaaattgagaaaattgttgttaataatagtacaatatttaaaagaaataggaaaccatcaattagtaaaagaataatggatagtttaattaaatatcgtcaaagacaaggaatttcaattgataggaataaaattttagttaaacaatggtttagaaaaaattttaaaaatcaaattatgaatgattcaagtggtaaagttttaattttagctcaagaatcattagatatgattaataaaattattaaattttgtaatgaaaatctagataaggcagataattggaattcaaatagacaatatcaacatcaaattgaacttttacataaattacaaaatattgataaagttaaggatattaaggaagataaatagtatatatttcatatttatatctcatatttatataatttaatcaagtgcttttaaaacaccttcaataccagatttttcaacaacacctttttgtgtatcaatacctaaataatcaattttaccctctttattaacaattatagcacttcttaaaccacgtaaaccattctttgcgaaaacatcatttggttcaccaactaaacctaaacttgataaccattcagcacctgcatcactaatgaatttaatataaccattacttaattcatctttaatttctttcttatcactaactaatgaatcaccccaagctcttgtaatgaaaggactatcaactgataaaattaaaacttgtttaatacctttttcctttaatagattaattgaacttgttgtaagaaatgcaggtatatgtctttctgaacaagttggagtgaaagcacctggtacaaccacaattaaataaggtttttcaattttatttaaataaattttttcaggtgcaaatgaacaagcaccttcaattgcaggtggtaaatgaaataatgggatttctgatggaatagttgagccaatttcaatagtcattataatgtatttgttttatttgtctaataaaagaagtgaaagtgttaaagttttaacaattaagaagatatcggagtgtatttataccaaaattattcagggcctggtactgtggcttttattaggtaattaggcaatcctcggctaggttaccgcttttgggaagtaatggttagtaatagccagggggaggctcagtttgatttctatttgtaatatacttgttcttctttctggaattgatatactggtagtgtttatgaactcgataatagaataaacgataatgtagttaaataaagaaataatgtacataaatgagctgtatatctggactcgatgatttaataagaaagcaaattaattatgttagaagaagtattcagcccattatcggctgctaaagctaaacctccacaaaagaaagggttagattatttcaagataagtaagaataagaaaggttcaaacaatctatcagaaattttagcattgaaactgacaatttagcattttatgaactattgaaaatgatgattatagcatttagagagataattcttaatttaaataattgttttggtaatttttcaacaaaagttggtcaacttaagattgcaaattataaatcagtattgtataagacaatcaaaaatgttatagcgtattctcaagcatcagttaattacaatgaatctcatcatttagtggtagtgcttgtaaatttcatgttaaagttgatagctatatataaaattaacgttgtaaatccaactaatgataatgatgttcttagaatcattggttatatattgcaacctgaactttgaacaaaatcactcaatagatagacaagcaagggcagctgttagccggtgtttagcttgatgatataccgttatagaaagaaaagattgataaagtatataatcaacccagaaataagaaaattaaagatttaaaaatagacacacgtgccctgttgaatttaaaaaaaaaaaatttgtggcacaagacataaatttatcattaatactgacatattgcaaggttgccctatataactgataagatataataataataataataataataaagttataacgacaatgatagagggaaatgatactcttgatggtacccttattccttggaatatctatcttttatcacctgataatcaatctactttgcataatatcacttcaaatatgccttcaataatacatcaaccactgtcaaataactcatgtccaacacctatattttcaaatcctttaatatcaccaatttcaaatgctttatctccttgttttgtatctttattatttggtattctgtcattatcaactggtttaactggtttatatcaattaattaaatatctaaaatttacttcaacttcaggtcatttaatatcagaatctttacatcaatatttgaaaatttcacttattttattaaatgctttatttttcagaataatatttatttcaaatgcttttaattcaaataataatttccaattattaatgtatattttcacaatggctcatttgaccttaataattttaccattacatttaattgaaatgtcaaaatcaattgttccttctggatctttattattctattggcctttacaatcaggtttattattatctgttattattcaacaaatttttgcatctgaaaatcataaaattattcaaaaccaatcttcatttggattcctttttctcatatcattgttattaacaagttttacaattttctcattagaatattattattataaaccaaataaagaattatatttagataatgaagataatattgcttatttatcagaacctgatattatttcaaaattaactttttcttggatgaataaactgttacaattagcttatcaaaatggtggtttagaacaatctgatttacctttacctccaaaaattgttacaacccaatattctgctccaatattagagaaaaattggaatttagaatataagcaaaatcctcaatcaccatcactattaaaacctttaactaaaacttttggtttaggtgttttatctgctttaacatttgatatgttagaatcaatcgtatcatttattcaacctcaattactaagaaaattaattcaatttttcaatattaaaaatgattcaaatcctttaattattaaaggtttaacaatctcatttttaatgtttttatcaaatttattaagtacagctttttacaatcaatatacaattttaacggttcaagtggctcaaggttgtaaatctgctctaatgtcattagttttcaataaagcaatgaaattatctccagaggaaagaaataatagatcaactggtgatataattaatcatatgtctgttgatattacaagaattgaatcattaacttcttatgttcaaacaatggtaagtgctccaactagattaattctctgtctatggtctctttattggttattaggtaaatcaacttttgttggtataattacaatggctataatgatacctttaaatactatattagttaaatctttaagaacttatcataaacaacaaatgaaattaaaggataaaagaacaagttttgtaactgaaattttacaaaatatcaaatcgattaaattatatgcttgggaagatccaatgttaaataaattaaaatttttaagagatgataatgaattgaaaaatttaaataaaattggtattttatctgctggtattaattttgcttggacttgtgtcccattctttgtttcttgttcaacttttgcaacttttgcaattatttcagatataccattatctcctgaaattgttttccctgcactttcattatttgatttattatctgatccaatttttgcaattccttcattaataactgcattaattgaatgtaatgtctcattaaatagaattttatcattcttaacagcaaatgaaattgattcagaaattataactaaattacccccagtttctaaaattggtgatatatcagttgaaattgaaaattctactttcctttggtcaaatcctattaaatctaccaatcttgcatcaattgaggaacaaattgaaggtaatttatcacctgctttaaaggatataaatttcactgctaaaaagggtgaattaacttgtattttgggtaaagttggttcaggtaaatcaactttattaaaatgtttattaggtgaattaccaacaattccttcatcaaataatttgaaaaattcaattaaattacatggttcaattgcttattgttcacaaattccttggattattaatgcaacttttaaagataatattttatttggttacaaatatgatgaaaaattttatcaaaagacaattaaagtttgtcaattattaccagatctagaaattttaccagatggtgatgaaactttagttggtgaaaaaggtattagtttatcaggtggtcaaaaggcaagattatcattagctagatcaatttattcaagatgtgatgtttatttatttgatgatattttaagtgcagttgatgctcatgtcggacaaaaaattattaatgaagttttaggtaaaaatggtattttaaaatcgaaaacaagaattttatcaacaaattcaatgaaagttttaaatcaatcatcaaaaatttatcttttagaaaacaatacaatttctgaatctggtacattagatgatattgataataatattaattctaatttatttaaattaattaatgaatatggtatcaaaagtgatgaaactgatgtaaatgaagttgaaagtaatcaaccaacttttattgattcaaataaagaagaatatacccaagaaaatgatcaaaatgataataatttaattgaaggagaatatgaaagtgttggtgcattaggtgttaactttgatgaaacgactggtgaagaattaattagatttaccaataaaaatactgatgtaaataccaataatgatgatgaatatacattgagagctgcaagtatcgaatcatttaaacaattaaattttaataatgatattgatagaaagatgaatcaaactgaggaaaagaaagaaaagggtaaagtgaaatggtcaacatttaaaaattatgctaaagcatgtacatattcaggtattttcattacattatcattagttgcaattactgttggtatgtcaattgcaagtaattattggttaatgtattggtcagaacataatattaaagaaggttcaaatactgaaatttttaaatatgttggaatttatgcattattaggtattggatcaggatttttcacattagttagagcaatgtgtatgtggacattatgttcaattcgtgcatcaaagaaaattcattatgatatggcaaaggcagtaattaaatcaccaattatgttctttgagacaacaccattaggtcgtataattaatagatttagtcaagatatgagtaaaattgatagtgcattaccaagagttttttctgcattatttggatcatgtattaaaacattattaacaatgattataattggatataatatgccaattttcattataattataattggattattatttatttataattattatcaacaatattatattataacaattagagatttaaagagaattatgagtataagtaaaagtccaatatttgcattaattcaagaatcaatcaatggtagtgaaacaattagagcatatggacaaagtaaaagattttcatttttaaattctgcaaatatcgataataatttaatttcatcatattgttataaatcaacaaatagatggttatcaactagattacaatttattggatcaattattacattatcaacatcattactggcattaacatcattaaattcaattgataatagaatgagtgcaggattaattggtttaattatgagttattcaatgagagttacatcaagtttaagtttcattgttagaagatcagttgaaattgagagtgatgttatttgttgtgaacgtatatttgaatattgtaatttagaacctgaaattaatgaaacgttaattgaggatcaattaattaaacctgaatttaattggccaaataatggggaaattaattttaataattattcaactagatacagagaaaatcttgaaccagttttaaaaaaattaacattttcaattaattcaagggaaaaaattgggattgttggtagaacaggagcaggtaaatcatcattagttttatcaatttttagattattagaaccgattgaaggatttattgaaattgatggaattaatacaaataatttaagattatttgatttaagaagtaatttatcaattataccacaagatgcacaatgtattgaaggtacaattagatataatttagatccattaaatgaatataatgatgaagaaatttgggaatcattaagaatgtcaaaattagataaacatattaaaaatatgtcaattgaacaaaatttacaaaatgaaccattaaattgtttaattagtgaaagtggtagtaatttatcagttggacaaagacaattaatttgtcttgcaagagttttacttaagacacaacaaaagagtaagatacttattcttgatgaggcaacatcaagtattgattctgagacagatagtgttattcaaagaacaattagagaaaaatgtaatcatttaacaattattacaattgcacatagattaaatacaatattagataatgatcgtatattagttctcgataggggagaaattgcagaatttgatagtcctgcaaaacttttatcaaatgaagagtcaatgttttacaaaatgtgtgttgatggtggttatattccaaaatagatgcctttccccggaataacatataacattatcccacattacgtaacaatttttccgtctatattaataataatgacataatctccccacaaaagaagacaatagattatcatgagattttcccagttttcccagtttttccagtttctccagtttctccattttttttcagtttctggttggttgctataaaaggaacactgtttgccgtatctttgctgatgatggtggggtttttagttaatgtatttaattcctctttcttttcttttcttttttctcttctctttctcttaatcttgtatattatatttatattaatattagataacaaagatataaattatataaattatatattagacattagacatgacagtaagtaacgaaataacaaattcattaaaggaattagagaatgaatttagtgttccaaaggaaacacttttaaaaattattgattattttgttgaagaattaaatcgtggtttagttgatggttcagatccattaggtattccaatgaatttacaatgggttatggaatatccaacaggtaatgaaactggtgattatttagcattagattttggtggtacaaatttaagagttgttatggttcatttattaggtaatggtaaattagagacagatcaaggattttataaattaccttcaaatatgagaacaactaatgatagaaatgaattatttgacttttttgctgaatgtttagaaaaattcttaattgataaacatccaactggtatacctgaaaatcaagttttcccattaggttttacattttcttatcctgcaagtcaaaaacgtattgattcaggtgttttacaaagatggacaaaaggtttcgatattcctggtgttgaaggtgaagatgttgttccattattaatggaaaaaatcattaaacgtaatttaccaattaaagttgttgcattaattaatgatacttgtggtgcattagttgcttcaagatatgttaatccgaaaactgaaatgggttgtatttttggtacaggtgttaatggttcatattatgaaattgttagtaatattacaaaatttaaaggtttaattccaaatgatataccagaaaattctttaatgttaattaattgtgaatatggttcatttgataatgcacataaagttataccacgtacaaaatatgatttaattattgatgaaacatccccaagacctggtcaacaaacttttgaaaaggcaactgcaggtttttatcttggtgatttattaagattagttttattagattattataagaaaggaattattttccaaaatatttcaaatgaaactgtcaaaattttagaaactgaacattgtattgatgcttcattcccatcatttttagaaagtgatgaatctgatgatttgaaaacttgtaaaaaattatttaatgatgttttcaaaattgaaaatgcatcatttgaagattgttattttgcaagaaaagcatctgaattcattggtacaagagctgcaagattatcaacttgtggtatttcagctgctgcaaagaaaagaaattatgaaagttttgatgttgctgctgatggttcactgtatcttaaatatactaaatttgcagagagagcagctgatgcacttgcctgaaactttcggttggccagctgatatgccatatgaggaacatccaattaaaatcgttcaaatctttagatggttcaggtgttggtgcagcagttattgcagctcttgctcataatagacaatcaaagggtctttcattaggtatggaatgatcaattacttttctatcattactttactttacttacattttactttacttacttcactttactttactttaccctcctttctttatgttttaaaccctagttaacgtgtatatccttttgataatgatatataattttatgaaatgacaaatttgatgaaatgaaaaattgactactgataaacaacgaacgttctataatagacattccactttttcttttcaatttccaaacaatggacgaattacttgatggaatagtacctgcaggtaacatattatcgatatcatctcatgttgttcatggtagtgttggtaatgatgcattacaattcccattaaatttacgaaattggaatattgattgtatctatacgaccaatttatcagctcatccaggacacggacaatttactggtgttaaagttgaaccaacattaattaaagatttaatatcaggattaagagatttagaattagataataattatcaagttataattattggttatattgcaagttcagataatttacaaactatttggaatgatgttttattaaataaaagtattgaaaattcatgtattataattgatccaattatgggtgataatggtaaaatttatgtttcaaatgaaattgttgaattatatattgaattattaactaaaaatgaagttataattgatttattaacaccaaatcaatttgaaatggaattattaagtggtattacaattaattcatgggaatcaatgttaaaagctttggatgtattttgtgcaaaatatacaaaagttaaaaatgttgttataacttcagttattatagataatataatgtattgtgttggtacaagcaatggtaaagtatttttttataaagttgaacaagttgaagcaatattttcaggtagtggtgatttatttttaggtattttaacagatgaatttgttaaaactaataaaaatttacaaatttcattatgtaaaacaattaatacagttgcaaaagtattaaaattaaattataaaattatgaagaatgataaatttacaagtaaattaattaatggtaaaccgtatataccagatttaagattaattgaaagtaaaaattgtttattagaggattcagaagtttatgatccagtttatttaaaatagaataagtttatgttataagttctgtatcaatatcagataattcatcatcatcaatatgatgtttattattattattatcttcattattaattaactgtttacttttctgcttttgcatattcatccttgctattttgattaaatcttcataatgatttttattttttttattccaagatttatgttcattttgatgtcttttaattgtttctttatcaaatgttataggtggtgaagaattagctgatgaattattactattggtatcactatgaatattattattgttttgagtctgaatattattatttatcaaactttcccacttttttaatttagaaattaatgaaatatcacttacaggattaattgaatcaagatttgcattatataaattaataaattctttcattctttgttccaattcatttcttttaccattaattggtaatttataataatttaatttttcctttaacttatttgttgaaattgatgtatctaaattgggtatcctttgttttctcttaatggaattaggttgtaattgtatattaatttgtctctttttagtgttcttaggggtagtactttcatcactactactgctgtttttgaaaaacgatcgtgaagttgttcttttagtatttctattggtacttccatttggatttttcaaacattgatcaatatgtttaccttgaatttcatcaggagtcataaagacaccacatattggacattcaacaagattatcttgaacctcttcttttctttcttaccttcattcacattcacatttccatttccatttaattcagaaataactgaaatatcagatgatgaatcattttgcgaatcatttactaaatcaattgataaatttttcaataaatcatttctattattattaaaccatttaacaatattatccagtataagtactttccttaaactactttcataagtttcctctaagcaaagtggacatttatttgaatttgaaattgtccttctaatacaaattgaacaaaatacatgtccacaacttgttaaaactggtgcatttaaaaaatctttacaaatttgacatcttaaaaatgaatctaaattactcaaacttggtaatttacaattatcccaatcacttggatcagatacttcattgatgttactattaaagttcattgatttaaaagaaaagagtaataaataattcatgatttataatatttcaattactaaaaaatttcattacatttacgcgttactctttcattgggacttggtgatctttcatcaatgaatctgctttgccttctggtaagatactcttagcccatggcggtattggagctgtaaatgaccaattattactaccatcatgttcatccttatatgaataatgaaatgaaaataatctcatgtaattatcttcaacattaagttgattattataagttacatgggaacagtttgtacaaacactttccatttcccaattatcaactctttcatttaattgattctcatataattctcttaatcgttgaaattcttccctattaggtggtgaataaattggcattgataatattttatctttaccatataatggatcatttattattggataacctaaatttttcaaatgttgtctaatttgatgtttacgtccattttgaagaaaacatgaaatcaatgaagtatttgaaactgaatcgtaatagacatttttgaatactgtctttgcattaaattctttaccaacacctttattaaatggtttcgataaatcaatttcaattattggatttgtttcaattcgtatttgatcaccaaaattaccttcaactaatgcaaggtattgttttgttaatccattcctattttcaataaatttattaaattttgaacaagtttctgaatttttagctaatattaaaacacctgaagtatctttatcaagtctatgaattatccaaattttatccgtttgtaagtaatttttagtaatcatatattcaattgaattataattatatgccatacctgatggatgaattggtataccaacaggtttattaataactaataaattatcatcttcaaatattaaattatcatttccattatcattaaggttaaatattggtacctttaattcatgaatacatgcaaaatttgcaattatatcattagttttgatcttagttgtcaatagagtaggacctttaatcttttgatgcttagagaaatctttaccttctattttcttgaaacgtttccttggacgataaatccataattcattgtttaatatttgatctttgaaaaaagtttcatttctaccaataaatatcttatttaaatattgtaatactgtaagttgttgtggaattccccttcaatgatacattattatacattaatttcttatatggtgtaacatattgatatccatctttatattgataaattggtggttttgactttggacttattctctcaactgtaattggaattttcgaaactattgaagaaattgattcatttggtttagattctacatgtataattgtagttgttgaaatataccttactatacatttgaacatttgctttttctatacgttaaatgattttcattaataataaatttataaaaaagaatttactcttacttatatgctatatacatactaccataatttttcaagtgtaccaccactacctgtaccatttttattcttaaaatgtaataaagctgaaacaattttcattaattttgtatgatctaattcaacttctgcatcaaatgtaattttacctgtacctggttcaattctatttaatttttcattaataattggaattgtacctctaataattaatttataatcaacttctttaaggaaaattgaatcttgttcaggatcttcatcaatatcaccattaattctttcctttaatggttgaatatatttatttatatttgaaggtaattgaggtgaatcaatttttcgataattaattaaaggttttaaccaattttttctaaaatctaattcaataccttcaactgataatttattaaatttaattgaaatatcaaatttttcaaattctccaagattaacaggtaaaccaataaattctttaatttcatgattcatatttaatctacgtaataaaatatcttttgaagttgattttaataattcaatatcaatattttcaaaaccttttaattcatttaatggtataattgaattaattttaaaagggaaaaatacggttctattattaattgtttcataaataatataacctgaagtaaatattaaacaaggtaataaaacaattgcaattttcaaaaatggtatccaccatggttttttataagttatcggtgttatgttatttgaattattgttattattattactactgtttttaattttttcaatttctgattgtgataattggttctgtaaaggtcttgaagaacggaatgaaggtggaatatttagacgatttttggtattagaggaagaggtatttattttattgttattattattattaatatcattaatatttttattaaataaataaggagaataagagaataatcttaattggttatatcgtaccaatctattagatgatttgagtaatgaaagcattgttatataaaggaattgatataaatactgattaaatgtcagatttcaagatcatcaattcatgttagtaaatttattatcagcgagcgtttacttgaattattgaagggtaggtctttattataagtaagaatattaataatgagtggtattagtagtaaaggtagtatattaacatgggatgatggaccagaagatgatgaagatagttggattgatgaagaatttgatgtttctgagatgattaatggaaataaggatgaaaagaaggatgaaaagaagaatgaaaagaataataagaataagaataagacagttgatttacgtaaaaagttagtaaagaaagtagttgataatggtatgaaggaaataccgagtaagccaaagttaatgagagataatgaaaagaaagaaactaaaaagaaagagaataaaaagaaagatagtaaattaagttatgaagaacaattagcaaaagatatggctagattaatgccagttgcaggatggaaacctgaaattgaaattgaaaataatgaggaagaatatgaagaaaggagggataatcattatactagtccaaagagagataacagaagaagggagtataatagtaataatgataggcaccattatagtaataataataataataaccataataaaactactaataataagaaaactagtgaaattaagtcaatgtgggaaaatgcagaagaagaagaagaagaagaaggagaggaagagaaagaaagggaatataataataaacataatagagtagaggaaagtagagaatattaccgacaacagaaactaagagatagacttgaatgggatggtaaaggtaatgtaattaaacaagaagaaccaaaagaagaagaagatactcctaataaacatataaaacattcacactttacctatgataacagtaaggaaagtaatagtaatagtaatagtaatactaaaactaagaaagatactaaacttgattcaatttgggcttaatgattatgattatgtaatattattataaaatagacgcgactgtattacataataattattacgtaatgtacatcagtacaccatctagtactaataataaaatttactaaaatttaattggttgagaaactctcactataataataatagtggattgattttttctactttctcttaactaagttttcaattacataattatcatacttaacatgattttataatttatcttagtttatatcctatatcttatatcttactccaattaacaatcaagatggctaatccacaaagaattattgaattacaaaaattttatcaaactacaactaaacctctttggagagctcatccaaatgctaatttagttttaattccttattttgctgctttcggtatctctttaggtgcttcactctatttcgctgttagagcaggttttggtattaaagctcaaaaatagattaattaattaattaattaactatacttatttaatcattcattcttatatatcattatcatactattattataaaacattaatttacttcttattaatatcaataccatactattattatgaatgttgataattatttcgcgattttatcttgtcaaatttttgtaacccatccatatatctatcctttttttattattcaatggataattcaattaagaaaaaaagacgtcctcatacaagaacttcaaaagcttgtgatttatgtagacaacagaaaactcgttgtttaagaaataataatattaacaataatgaaaatttaatttcttgtttacgttgtacttcattaaatttacattgttctctttcaaatgatcttaatactaataataataacactaatataaatataaataattctctaaactcttcaaataatatcacaaatccattatatttaccttctatttataataattcaagaaatcattcattatcacattctccaatacctttaaaacattcagataattcaaatttaccacttttatcttatactcctccaatatcttcaattgatgtaactaaattagatataattaataataatgttaaatctattcttaatatactctcaaataataatattaatctaattaatcaaaattcacctcctttatcttcaaataataataatattcataataataataataataataataataatattaataacataattcatcattcaaaacctttatctcataattcttcattaaattctttaaatccaattgatttattacctatttgtaatgatccagttaattttactaatttacccatacaaagttattcattatcaccaattaattatttaaattcaattaatgataattcatctaattccaatatctcattacaattaccaatttcactaaagcaacaattaaatccattacatttatttaaaccaaaattcgaagatataataaattctaatattttatcattaaatcaaacaattcatttaattaatattttccgtgatagatatggtcgttggctttcatttccttcacttaaatcaactaaaaatttaattaaaagattaaggaaaagatgtcctttattattaacaattagttgtttattaagtttaaaatatggtgatcctttattgaaaaataaagtttggtataaattattatcaattataaaaagagaaatttatttattaaattctttaaattcttatggtttagaggaattacaatctttaattattttaagtgcttattcgattattttaagtgattcatcaattaatgaaaataataaattaccaaatttattattagatggttggaatttatcaggtattggattaattatttttgaaaaaattaattcaattggatttttagatcaaatgtatggtaaacaaattgaaaatttatggaaaattaataataattattcaaataatgataataatgataataatactaataataataataataatataataccaaatgataataatacaacaaatagtgtagataacaatgaattcgataatgatgattataataatgattacaataataacgacagtgatggcattgacgaagatgatgaagaggatgatgatgaatttaatttacttacattacatagaatttggaatactttagtacttattcatttagcttattgtttattatatggtaaaaaatcatggatttcaattgaaaaattaaaaccaagggaagtttcagatatttcaagttcaacaaattttgattttagaataattgctgaaattcatatttatttaattgcatataaatatttattacttaatgataataattcaaataataatttaaattcttatagtgatacaattaaaagtattaaaatttggttagataaatggaattgtacatttggtcaaccatcaaatcaatttgttgaaattgattatcattttgttgaaattttaattaaattaaaacattcaaaaattgatttaaattcaatttgtaaaattattaaagataataattttaatattgaaattttaaataatttaaatttaaatgatttagataatttaaaaactcatagttcatcaataattaatttaattaatacagttaatgatgattcatattttgcattcttgagtgatcaaattcatttaacagttttctttgcaactaatgtactaatatcttcattaacaattttaaattacttaaggaaaaattatttaaatattaataattcaactacaaattcatcaaattttgataaatcagttttaaaaaatttcattattgataaagaattattaaataaaattgaaaatttaattttcagatttaaaactgttgcaacaacaaagaatgatactttttacaaatattatagtatacttgaaagtaattataatattaatttaccaagtgtatagtaataaataaataaactctatttacattaataatattaaatcagactgacatgcaaatcgaatttagttttggcttatcatcacacaaagtgctccaaaactaggttaaagtatcatcacatttaatataatataataaactacaatgtaatacattttaatttcttttttcacctgaaaataaaaaaaacaaaatgcaactaaaataataaaggattacaattattattcgatgtttcagcagcacggctcgtcaaagccggtttatcatcaaaaatctctcttaacaaaagtgagattgcagttgaccgtcgtgattgtgctgctgcatcatataacgaataataataataaaaaagaatagaatagaaaaaaaatttaaaagaaaaagaatcaccatcagactcgaaaaaacgtgtcttctttaaagaaatttcagacatatgcttgtctttttattttcaaattcatcatatgggaaaaatattaatagaaaaccattttgaattgtttgttggtaatatattttttaatgaataaaatgaataatttcacctgaaataattagtattttatctttagttgtatagtgtattgtaatgtaataatgtaataatattattttaattattctcatcagaaatgcatgaatggtataaaaaaaaggttatcagcattgtgcaacacatctgactcgtcatctaaagaaatcatcaattgagaataacaaacaataaaatagaatagaaatagaaatagaatagaaaaaatagtttctaaagaaagaaaataattgttattgataaattttataatcagttacgatgggtttctgaggcccatcattaaagcgttgtcactttcatgtactatcagtgcccagtgctataattcctcatgtaaaattatcaataatcagtaatataagaaaatggtaatcagaaccctttccaagaccttattccaaaaccattatatttatttccctctatagctctcttccccttatccctctattaaaaaaataatgattattaactaagtgttcagtaagcagccaaaatttctcagcatttatataaatatatcagccggtaattccatttgtatattttgtttagtcatcatgcttagttaataatcaatatcatttatcagtgaaaaaaaacagaaaatcaaaaaaaaatcaaagtaaaatgaaatgaaaaatcaaacaactcttataagaatcaaacaagactcttcttgtataatcttaataagtcaataaaatatgtggaatttggataaaattttcagccaacattctaagatcatgggttaatcataaactctagtttgaatatttacggttgtgatcatcatctgtatccaaattaaacatacaaaaaagaagcccataataataaaacaatcacttcactcaacacactattaccgaccaactggccaaccaacagtgtcttattcccaaaagggcaaaccaaagaaaaaaaagctgagcctgtacctacaaaattgaaaaagtgggaaaacttctccttttataccacgaaaataaaaaattttcaacttgctcgccttttccactgtgagggaacttcaccactgaaaaaacagagggtttctcaatcaagtctatattctaacaactacacgttatatagagtatatataggttagaagattatacaaggagtaatgactggatctccatatacatgcactgaagtacccatcgaggggaaactgcacaacatgcagtgtgtttcattgccttccaatcttggtaaagctttaaaaggggcttgtttatcattggatgatatgttatccttaaaatctaataaatccattacaaagacatcatttgctaaattacatagattgaacatggttaatgatttagatataccaatattaagttttgaattatctggtgatgatagcaataacgataataataacattaattcatcaattttaactgtaaaaccaataaaatttaataatgctattaatgatgaattaatttcatattcttttaaattacctgcagattgtttacatgaatgtttcactattatggaattagatgaaaaaactatagttattgatttaatattacaattaggtattgttgtttcattaagattgaattattcaatttttgaaaatccaattgatttaaattatgagaatttctatgattggtgtactatttcaatgccatattcatttgatcaaagatcagttttatcaattttaactattgatgaatataaatcaatagtttcaactactgatggtggcttattattattatcaagattaaatgtttcctctccatttgatgttactccattcacttctgtttcatatttatccaatttgaaaagtaaatttttccgtacttcagaacaagttcaagaattaaaatttttaaatcagtcagttacagttgattcaatttttgatatgttaaaattatcaaatgatatattcgttactatttcattcgataaaaaattatccttttattcattatcatcatctcaaattattagacaatatgatcttaataattatatacctgatatattacatcattcagttttatcaccaacatcatgtaacggttacttaaaatttattgcaacttcaaactcaaataatttattatcattattattaaaattagatcaaacatatattttttcatttgatttatcaattactgaaagaaatgatattgaattagatttgttatccaaaattactcacccttcccaaaatgaacaatggataccacttaattatgatgttacaacaaataataaatttactaaatatgctatctgttggagttattcaaatacttcatttataaaacaatgtattgttaaaaaagatgacattaataataatgttcaatggtctgattgtattggtttagatgatgaacaaaagttaaatgctaaagaattgatggatttaataaatttcacagaaaatgatgatgaattgaattcaaaatcaattgaatttattatgagtgagtataataatgatatcttacaaatggctcttcagatatataatatcgaaataaataatgatgttgatatcaatacacttgataatataatattaaagcttattacaaatcaatcagttataaataatgggtttactttaagaaaaagttggttaaattttgttagtgtttgtcaagacattaaggaaaaattatattataaaacacagtcagttatatttgatagttcatcaaatcattcagatcaatttttagtatgtattaaaggtggttcaagctattccataattagaaattctacatcatttgagatgttattatttaatagaaatggtaaatattcatcaataattgatttcccatatcaagatcaaataaatattgactcattaactaaacttgtcgatttatcattagattatttaacatcttttgaaggtgaattgatttataaaattaataattatatgataaattcaagaaattcacatgataaattaatgaatgaaatttttgaaaaattcatatttaaaactacaaataatgaaaaagttacacatattttacaaactcttggtagtattgataatattggtgatgtactcaatttcttaacaatgttatttaatactgaatttgatgaatatactttgaataatagtagtgttatgagtctattcagtgaaaaattaattgaaaaatcaattttattaaatgcaaaatctgctaaaattatagttacaggtttattacttatattattaactgttgattataataaatcaattgaaaatatttttacacctaatttacaaaatttgaaaactattgatttgatcgaaaatatcaatttattagaaaatgaaaatttattaatgaaattcataaatctaaacaatagtggaaaagttttcatcaaaaataatactattaatatgattattactgtatttaatgaacaattatcaaatgagaaattcatttattttgtgatatctgaattaattaataagaaaaaatattcaactattgaaaaagattttttcaaatatttaccagatagtgaattttcaactgtattaagagggttagttactcttgatgatgatgagaataaaccggagaaagcaagagaaatgtttacacttgcagttgatgaaattacatcttataatacacataatggtatatttaataaatatttggaaattattttaaataaggaattaaaaatggaaattgaaactatatttgtaagttctaaaagtgcatattttattaatttaagtcatttatttgagaaaagagataagcttgcagatgcattaaaattagctcttgaatcatctaaaaacattattaaggagaataaagttgatacagatttagaagaattaatttattataaaatatttaatttatcattacaattgaatgaatttgatattagttttacagcaattaaacaaatgttacatcaagatagattgaatgcattacgttcatttatttataaacttttccaaatcaatagattaactgatattgttaaattcaattatgcagaagattttgatacagtttatgaattaatttatgatcttggtgagaaaactatgcaatcaagaggtgatattaaaaatgcattaaaatattatcgtacatgttattcattatgtattaaagaaggtgatttccgtgcagctgttgaatcattatatcgtttcaatagtcaattgaaggctggtgaaagttcagagagagataagattttacgtaacaattatttgattatgttaaatattttaaagacaatggaagttgatgatcaatggattttacgtcataataatgatgaagatgttgtcatcacaggtaaggagctagaacatgaatatctcgatatgagaaagtagataattagacattagattattagatattgtataactctcgtataactataataataataataatttaaacgaataggagtaaagcgagatgtcattttgatggggtgacaagtgaaattttatatttttcatagtataggactggtggtacttactccggttgatcttcaattactgtctgctgtttgtgttattagagtatagttggtgtgataataaatatatagatatatacaatggtattaccaaagaatgggaaagtggcaattttgggtgcaggactttcaggtttatcatatgcacatttccttggtactcttagaccggatttaaatataaccatattagaaaagaataatcgtgttggtggatggattaatacgcagaaagcaacatctgcaacaattaataaacttaaattaaataatgaactgaatagaactttaagaatggagaaaggtccaagaactttacgtggagtttcaccgggtactttaattattactgatttattacaaagaatgggtaagttaaatgaattacgtggtgtacccattgcaagtgctggtaataagaaatatttacttggtaaggataaatatgctgaaagtagtaatagaataactgggaaattggttccagttccaggtggtggtaatggtactataattgatggattttcacaatcaatgaattttattgcaactgaacccggtatgcatattataaaggggataattagagatgttatgttcaaacaagatggtgaagatttaaataaaatgacagttgctagattctttgaaagacatttcggtaaagatatggcaaatgagagtataagtggattattgtatggtatatatgcagctgatataaatgatttaagtattaattgtgttttcccaacattagttgatattgaaaggaaatatggttcgattgttaaaggtatgattaaacgtgataacccagtagtagagattcatcccactgtgagtaaatatttgaaattatttggtggtagtgaattagatatggaatcgttatcaaaattattgaaaaaattcccaatgttagcatttcaaagtggattaagtggtgtaactgatgctttaagggataaattaccgtctaatgtaaacattcaaactagttgtcatattgatcaaataggttcagatggtgttattaatgttaaaggtaaagaaactatcaaatttgatcatattagaagtacaattccaacatcagaactttctaatatggtaaatgatgaagttggtaatatattatcacaattcccatatactagtattacagttgctaatattcttatcaaaagggctaatattaaagaagctgttggatttggatttttaataccaaaggcatgtctatataaggaaacaccattaataggagttatatttgattctgatgttgaagaacatagtgttccattattccccaatggagaaattccatcaattttaaatagtaagaataaaacagagccaacaaaggaagttattgatgaattatctaagaatatatcatcaagagagggtgaaggtataagtgaagaatgtacaaagatgacatttatgtttcaagttccacgtaatgggaaaccatccacccctgctgccattactagtgctattaaggatacactcaatggtatattaggtattgatatcgatatgtcagaggttgcaattgaatgtattacacatcaagatgcaattccattatacgatactgaatttcaagagagaagagaacaagtattaaaggtatcatccaatatttacggtgatcgtctctcactgggaggtacagcatttgcacccggtgttggtatcccagatgcagttatagggtcgttagatgcagtatcagagattgtataaagaatttataaagaagtagctcttaatagaagtaaaagaccttaaccgatgtcgcataatgtgggactttcttaaccaaccgatttcctcttaaataagtattactaattcatcaactttttttgtaaatctggtgtaacttctttcttttcccatctttaacaatatttaatacctgagagatgcaatctattatcagaagaacactattgagtggccgtagggctatccatttatctacaacaactacaccatcagaaaatgctttaaaatttgtctctaatgacactaaatttcttccagagggtttaacacaagctattgatattgaatcattagctgaagcaaatgaaaaatcaccacttgcaacacaactatttaagattaatggggtacgatcggttatgattggatccgattttattactgttaataaagttgatgaaagtttatcaaataatccagaacttaactggaataatcttactccgaaaattaagaaatctattgaaacctttactaaacaaaaaaacccattcttcaataaagattttatggaacaacatcaacgagatttagatgctctggatgaaaatgatgatgatatagtctttgaaattaaagaacttattaatacaagaattagacctgcattacaagatgatggtggggatattcatttcagatcatttgatgaatcaactggtactgtctatataaaacttcgtggtgcatgtaaatcttgttcactaagtgaagatactttaaagggtggtattgaaggtatgttaaaacattacgttcctgaagttgaagctgttaaggcagttcttgatcctgaagaggaaattgcaatagcagaatttgaaaagtttgaaaagaaactgaaaggtgttgtataaatgattaatttactctattaattctatataattatttgtataagaatcatgacatttctaatgctgccttatctaatgatttggccattttaacatcaagttcactaatacctccaacatcatgcgttgttaattcaagttctactatattgtaattgttaattatagtaggatgatgtcccatacgatgagctttcattgcaactctagttaagaatgcccaagaggtttcaaatgttttaaattgatatttacgtcgaatatgatccatttgaccatctctgataacacttttccattgtgggagtactttcaatgcgttctgaagttctgtactactcaatctaactgacgtcgtcatttatattttcatccaataaataaagaaattgtgaataaacgattcgatctcatgatatatttatcatggctacatcagaaatcgctctacatcccaacttttatcaatcttgaccacatctttcatacttcagtcatttcaccaaaaatcatgtccagtgcaatatatattctggacagagacctcaatcttatagttcagagacaatacagacatgatcttgactctcttcacatacttaactgtttccgagccgcgtacaaagcttcatatccactaagacgaccagtgatatcgtatcagaacatccatttcgtttaccttttgaagaaggaaattatcttattaacaccaatcttcaatgatttagatatattcacacatatatcatttctagataaactttcagaattaattttaagttattttaaacattataaattattaaaatcctctgcagatgatataatagcagatcttgtacgtgacaactacgttttaatgtatgagctattcgatgaatgtatggattttggaattcctcaattgactgaattctctgttttgaaagattttattaagttaatgattaaacctgaagattattatgatgaatctcatgtaaatgatgaaatcaacatggtagagaaacaagttgaaactgaaatcaattcatcaatttcacgttcagctgttaataaaatatcttggagaccaaagggtattttctataacaaaaatgaaatatttgtgaattttactgaaaatttgaaatttaagtttaatcataaaatacataaggttgttattaatcaaattttaggtgaaattaattgtaaaagttatttgtctggaatgccaaatttaaaattaggtttaaatgaaactgttgatgctacaaattcaatcttcaataatatacaatatcatcaatgtgttgatttaaataatttatcagataatactattcaatttataccgccagatggtgaatttaaattattaaattatcaaattttgaatacaaatgttttacaaccattaatactggtaaaacctctttatcgattgtttaaaagaaatgacacatataaattaagaattaaattagaattagttactacatttaaacgtaaattttcaatgactgatattaagattagaattcccttgattgttaaacatccatcactatttatcaatttcaataattccttaagatttaaaacaaaattaggaatcgtaatacatagcttagaggatgaatcaataatttggaaaattgaaaaactgcaaggttcaatgaagggtgaaatgcttgctgaatttgatcttatcactgaaaagcaattatatattacccatatggaaaactttagtagaggtaaacaacagaaaaatgatttattttactttgaactaagttcagaattgtcaaaacttagttcaggtaaatcatcaaccgaaaactatttcacggaaaaaaagaaactattcaataaagataatgataatatacttactgttgaatttgaattgaaaaatatgctttatagtgggttgaaagttgattttttgagaattaccgaagaacaattgaagtttcaatcatttccatggatcttgtattcagtttcttcaactggtgatgattattcatttgtgcttgcagatgaggagtttatgtcggatatagcagaagaagacgacaatttattaaaagaacaggtatacaaagcagaaggagaggaagaagaggaagacgttaaagaagtcaaagaagaagttgaagatgacaataatgaaaataatattaatgaagaagaactacaagaatcggatcagcatgtgcaatcagacattggtaataatgatgataacgtccgtgatcatatcggtaaatttaaattccataatggtgccaaactagattttgaagaatacgttttatctgatgaagaatagattagcattatcgtagacctaatttattatatagaagtagcttatatacatttacgtttatagcccacaacaacacagtagaaataagaataaaaagagtacaagttgaattgaaaatcgttggaactttggcaacgtcatcaaatttcatgatgtgagattaaaacatgttaacacttctccagccccttgttaaaccctcttctttgtttagcaaaacgactacatgaagctacaatcgtatccattgaacgttggatatccattatatggtgctgcatttgcaaatgacaacaccttgattgttgcaggtggtggtggtgatggtaataatggtatacctaacaaaatgactgcaattttagttcaacctgaaaacaagaaaaagccaatcaaaagatatcgtgaacttacattagctgataatgaagattgtgtaatgtctttagatgttggtaatggaacaattttagttggtatcaatgaaagtccattattaatgtcaaaaggtgttaataaacatttacgtaaatttaaatttgaaaatgatcatttaaagtttgttgaaagttgtcaaatccatccaaatacaagttcaacaatctatcaaaaaatcacatcattatcacatgatggatcaattggtgtcattgttatgagtgatactccatcatctgtatatatcgtcgaaacaagtggtgacctggaagaaaagtttaagattgtcactgaaggtgatgtgaaggatgttacgatttctttagatggtaaattaatgtgttatattacatctaatgattttgaagttatatctttgattactggtcgttccgtttttaaaacaaagttaaactttttaatgtcaaaagttagatttttagataataatgaagttataatttcaggttctaaagataatggtgcatttattgcgaaattctcaatatcatcttctaaaatcattcaacaaaaggttgtatacaaaaacatgaaaggtataacctcaatggatgtcaatatcaacaataatttgacagttttagctacctcaagttattctttgattttagttagaacatcagatcttaaagttgttaaagtactaaataaggttcatgaatttgctattacaaaggcagtattttcagaaaatggtaaatatcttgcatcaacttcagctgctaatactgttaatgttgttgaaatcccagaaaaatttgcagcttctaaatcaattttaagaacaatgcttaactacattatttcaattttcttgattttagctctctcaattggtactcaatatttatactctaatggttacttgaacatcgcattagacaaagcattagcattatatgagtcatataaaccacaagattcttcaagttattttactgttgagtcagtttcttcatttgaaccatccacagaaatcaatcatgcatctttagtcgagcctgttctttctgaaattacatctgatccatctgtcgtattatctaaatatgttacatcttctttagaagaacctttgccgtcaataatttctgagacagcaatttcttcattttcctcatatggggatattgccaagttgacagtgaatgatgatattattagtgaaaccacaaacacagaaacaacccagtctacggattcttttttagttaaagaggcaacatctgttgaagacattgattcgaccatgttgcctttaagcgatttgtcaactactgattctgaaaacaagaatggaattgaaactgaaactactcatgctaatatcaacactgagagtacaactgaatcagaacagaaaactgaaaatgaaattgaaactccaagtgaaaccatggctgagtctgaaattccaacttcaacaccaactaaaattgagactcaatcattcacttcaattgaccaatctgaattctctgaatcaacaaatcttttttcatcgtttgaaattccaaccacttctgaaataacatttgaaaagtttacaagctctgaatacactattcctactacgactttagttgaaaaaataaccagggaaattactaaggaagttacatcaacagttattgctaccaaaacagcaatttcaactgaaatttcaactgagatatcaactgaagttttaactgaggttttaacctctattgaattgctgacatcaattgaaacaagtacttccacgtcactggctgtatcaacagttctgagtgttagtacttcagttagtgtctctacatctatttatgttcaaactttatacaaagaagttcaagttactgttgaagcaacaccttcaccatattcatcatcattcatctcttcttcagttacttctgaaattggtattcaaattgaacctgaaaaggtagtttatgaagatccacttgaaggcataaaagaacaagaagataaaattttaaaagaaattactaatccatctactgttgaaattcaaattgaaccgatgattgaagtttatgatgatgttttagctggagagaaagctgcaaatgattatgtagttgatgaaattcttaatagtataaatgaaactgatgctgaagatgtttatattcagattgaacccaatgttgaaacttttgatgacccatcaaaagctgaagctgctcaagcatcatatgttgaaggggaattaaatattgaaaaaactaatttatctatccaaattgaacctgttgtcgaaacttttgatgatcctttagatggtataaatgctgaagcatcgatggtagaagaagaaattaaagcaatgactgaggttgatacagttgttgatgaagaactggtctcgacatctacaattcaaataacagaaacagttactcaagaacacccagaagaattttatgttgaggcagatagtactttactcgattcaagttcgtccttttcacttgaaaaagatgaattgtaattaaaaatagactgtttataattgtataacgactaaaaaagaaaaaatgatacataaatttgatttgaaaataacaataattgtcttatatttcacctgatttcttactgttacaagcaacgattttaaactttccaacatccaaggattcaccgtcatctaatttcataacaacatccttaatcacaaaagtccacacatcgtcacaaaatctatatgtgcttaaatggcctttgaatgacatctttgtatttacatcacttttaagtttttctgaagttactctatcaaaattagccaagatcttcatagctagttgtggttgtattctttgatcgacaattaatgtatctaatgcatctgctaatgtagcaccaatcctgtacaaaacgtaaaaccccgaatgggcaaaaataagttagtattttcaaatccggttaatagataacataaatcagtgaaatcagttatacttacgtgcttcttctataaaattcgtaatatgatggaccgttcattatgtagttattgcttggtaaagaaggaagaagccctcttgggtggaaatgcatgaaaacgttgtaatcacaaacttctcgcctacattgcaatattaaatacaaacttcaattccagagaaagaacttcttgtgtctgatcgttaagcagtattaaacacaggtgatagatattaaacatggctgttatatactaccgttttgtatctcaaaagccagatcatgttgccacaattaaatttgatggaacaggtttaacagtttttgaacttaaaagagagatcattatggtgaacaatttgatacattcaacagatatagatgttattttatatagtacagaagatattcaagctgtatcaatgtccgaaaataataaagagatggaagatgataatgaagttgttcctcgttccactactgttttggttaaaagaactatgtcatctagaaaaggtagaggtaatgtacagagatatatggctggtaaaccacgtttgcatgttgcacaaggtggtgatagaagtgcgcctaatagtgcaccaattattggatctgcagctaaagaaggcactgaagatgatatgcttgataaagttttcggtcaacaagatgcacaatggtcagaaactcaagattttatggctacagctactagaattgataattataaaccggcgttaaatgagcctgttcctgaatattacatttgttataaatgtggtgagaagggtaaacataatattaaaaattgtccaaagaataatgatcctaactgggaaggtgtccgtgttaggaaaactactggtattccaaagagtcagttgaaaacagttgcaaaacctgatgaaaatggaatggaaacttcagcaaatggtacaactgcatatatggtgaatgatgctggtaattatgttgttgctgttgcggatactaaagcttgggaacagtttcaaaataccagaaaagctgaaaatatggatataaataatggtgaaatagatgtagaggatggtgacttaaaggatacagaaacgggtaaattatggaagaatcctgtacgaacaccatgttgtaagaaaatatattcacgtaaaattattgaagacaaacttattgattcagatttcacatgtccaaattgtaaaaaagaagagatatatttagatacattagaaccggataccgaattacaagaaaaaattaaagaatatttaacaactctttcagaaaataaatcaaatgacaagaattctgtgaagagacaacagattaaccctgtcggtggtgcagtaaaccctatcaacatgccaattccaccaatgatgggtatgccaccaatgaatatgccgatgatgccaatggggaatatgcctaatatgggaatgccgccatttatgccatttatgccaatgccacaaatgaataacaatagtaataacaataacaataatgtaaataataacaatgctaataataacactaagtagttttatgtagattctaataataataatttataaacattcgtttaattaccggaagaatatgagataactgcccatttaccagaggaacaccaaagttcaccaacttcatttcctaattttttccagttttcaattaattcttcctctaatccttcaggtaaaccaacacatacatcagccttacatgttctaagagctaaaatatgaatatttgaatgagcaagggattcaagagcagttttaaatgatgtagtttttggccattctctatcgcttgttaattttctataatttaaatcacccttgacaataactaatgtagaatcttggaaatatttgtaaagttctgcaccaccaaatttatcatcagctggtgataatttagtataatcatatgcacatgtccaaaattcagaatcggctaacttaaattgaccattttgatgatatttttcaattgaattaacgaaatagtctaaatcttctctatgatctggaaaccattccttattattcatatctccaatgaataatttataatctttaatcattgtatctgaaaccatccaaggtctagttttacaatggaatgtaacatttttaacaagttttgcatctaaaaggaataatgtgaatgcaagatcagtgtaaaattcaaaaccagcattatctaaaacaaagtcgattcttctttcttcagcaggaactgataaaaatctttcccatgcttcaggtaaatcattatcaatgatattttttgatgatttagctctagcttctttaccttgtcttgattgtatatcttccaaagtagcattagctaataatgataaatcggttgcattaccccataatgaaatatcgacaaactcttcaaataaaagtttagccttttgaatatccaaatgaccatttaaatttttcaactcttcacttaatgtcttgtatctgatagctaattcgtaaattccaaaagctgatgatttaaaagcatctcttttcaaaatttcaaaaatatcataatttgtccattcactttgttgcttaatgataacatcaagtaaacggtataggtaaccttcaattagtaaccatggaccatttaaccaagttggggtcttctctaaggtatctaattcgatattataagattctaaacttggaatcaatttgatttcctcatcggtaaactttctaataataccgttattattgaattcaagtaagatattatcaattccgtcgataataaccttaccttgttcaacaagcttatcattaccactttgtgcattaatgtatgcttcaactgtgtctttagcttgtgtaatgatagttggccatctttttctagcagttgcaaaagcaaaagactttggatcacttaattgataaacaccggggactgcagacattgccactacttatttaacaggtttaacttgccaaataagagaaagaaacacatatatatacatataccccatgaaaagagtggaaatgcaagacccgaaggttaagtaccccgaagtgctaaagtgaaatttcaaattttcaattgttatggttacctaatgccatgttctgtggctgtggtataatatttttatgatggaatttataattgaatagtagtaacagtttatttcttttcttttctttgttgagtagttctcctatattgatcgcttgcagttatagtacaacacagataatgaccttcacagaaaaggaactggctcatttgaaggaggatatcctcagattcaaaatgaaattgaatatggataaagataatgaacaatatggggcatcaattactttaaatacaatgacaaatccagattctaataaaggttcaaaacttgatccaacatctcatggtgtctctaaattgaatttaaatcataacagatccaactataaacttacgtctgtagaaatttacgataacgatactgcaacttatgattctaaactggtttatgtaaatagggaaattaatgcagatacagaggaaatgattaaacgacaggtagaagaagaatttggttcagatgatgaagaagatggaatttatcaccatgatgataaattggttaatgattatgatgatccatacgtaactacatttaatgaaattttacaatctattaaaattgatgaacttttaaagccaattactaaaccttcagatgttgttaatattaaatcgatcaaccgtatatatcaagacaaatatttggataatttatcttcagaaactataaatattattgaaagagaacaacaacttgtcaatttattgaataaaactatggatatattcttacatgatgatgaggaacatcttgcagcagataatttaggattaccagattatgaccataatttagatttggacaaagtcgaacaaaatggtgggaaaactgcacaatttgatggaagtaatatgagaaatgatcctttctttcaaccttcaagctatacttcaaatccacaatttgatgatatagacccggtggaaatcgatgaaacaagacaattactgcaaattgcattacaaagaaacgaagagtttatcagagcattatcacaaatacgattaggatttttacgtgcagataattatagaaaaaatgtgtatgaatggtgtaaagagattaatgcaaatgaaattgcacaatctcaagcagcatctaatgatgatgaatgaaattttcatctttttattatatacagtatatgtacaatagtcttttagttatcatgtgtttctttgttttttgttttatctttgtatattgatatattatatccttaattaatttttgttaaaacatcaactaaatgttatccatttctaaaaccttggtcatatgtttagcagtttgaatatcaccacctgttaaaggaataacagatttactcataacaccatcaaagaattcttcaattaaacctttgagttcagaaccagtttgacggaaatctggatatgcattaacctctaataaactaacacctttgtctcttgttatatcttcagaaactaagaaatctaatccataagcttcaaaagcatttggaagtggttggaaattcattctatcaatattaacagcagctttaaatagatctgcaacaattaaatgaatttgatgaattatattttgttttgtactatctggtaatgatgatttagataattcttcaacgactttttcttcagtttgatcttgtaaacaggtattggtcaaatggcctgtcatttccataataccatcatcattaacttcatttgttgtattaggatctgtgtatttttcagcactaaaaagcattaacattctatcgtaaacgtaaacatttaattgaccacttgccaagacataagttctgatatggaattttctgttgttataatcaggtaataataatggatttgaaatatattcttgaacaacaaaatgtctaagttgtgaaattatcataccagtattctcatcatcaccttcatcgtctgtatcatcctcgtcaaaggagtcaaaaattgtttgaagttgatcaattgtcttaaaaaggtgtataccttgacctttatctgtcatacttggttttaatatataagttttatccatcttttcttcattttccattaaaacacaacgtaattcatagacttcatcaagaatatcatccaaaaattctgcatatgttagttcaaattggaaactttctggaaatgaggtctttaagatagattctggatgttttgcttgatacatagctatagtatttgataaataatgttttctaattaatgattttctgtaaatgtaagaattgacaatataattcttgtcttccattattctttcatgatcaagttcctcataatcaccataatgaaaaactttataatctccctttggtgggattgtagcttcaattgtggtatttgcaaagaatttaccaatagattttgataaaggttcataaatgtatgaatctttaggataagtaaccacaattcttaacttttcatcatctttatcgtcatttttattctcagagctataaattaaaagttagtataatgtaaagttatgatggtatcgttttgttcaagcattatgataattataatcttactactctaattcgatacttaatttgttttcaattagataaaattattaaattatcacatattcttacaaacaaaacttaaacacaacatatatcaaaagagaaattctaatttgtttaaatatatttgacttacgattccagatctaaaatcatttcaccgcaatgattttccctatcaatgtgtttaaagttagctctcaatgcagtgatagttgcatggccttgaccaacaactttaccatctgttaatccaacactagcatcaactgctttatgaacactatcataatcaggtttccatttgaaaacaataccatcactgacactaccatcaacaatatcaatatgttcagaacttgaattctttggttcttccttatgaaacaaactgttaccccattcattttccagtattggaacgtgataaattttagttttacctagtttaacattttcaactaacgggacattaactgtgtaaatttgaacatcatccttctcattccatgaatcccataatttttgaataatcttaatacttattaaacttgcctctgttagccattcagctggaacatttggaccatccacatatgaatatgaaagagcaattgaacgtttaccttgatgacaaccttccattgcaccaccaattgtacctgaagataatgcgtaaagagcagtagaattacgaccaacatttggtccactaagaacaagatcgacattgtcacgtccaccacacatatgattaacaccaatatcggcacacgttgcaggagtaccattatcaactaaacaccactcctttaaatcaggatttgatttatatttttcttgtggtcttgggaatggaccatgaaatgaattatcttctggtttagaaattgaagtgtaaataaatttaacagtaacatctttatctgcaaaatgagctttaccaatccatgatttttgtgaaaatggtacacaaatggttaaatcccaatcagtgtatttgataattgcacttacaagatacttaatgaatggagatgtaagatcatttggaccaccatcgtcattagttaatagcactctcattttctattcagtacttagttgttgattgataagaaggtagatttacaaaataaacaaagtccttccaatttataacatcaattaatgtgattctacttcttttgtggaagatttttctcttttgagtattgccgagcgactgggttgttcctcgtcagagataagtaactttcactgggcgattttttacattaaggacttcttcttgttgatttaataatcgttatcaattaattacagataacgaagataacgattattaagtcaacaaaaaggtttgagtatatgcatatatgaaaagtattactaattagttaacaaaaaaaaaatctatatcttaattgcaaatttttttattaaattttattatatcttaaaatctaccatactcttgcacctgcaagtttttcagaagaaagatcacctaaatctttatatttaccatcaactttatattgatctaaaagtttgaaatatttatcaaataagaaagatgaatctaatggaccaccctttgcttctggatggaattgaactgagaaaattggtctttctttatgtatcataccttcatttgatgaatcatttaaattaataaaatattctttataatctgatggtaaagtacttgcatcaactgcataaccatgattttgtgatgtaatatgacatttaccagttgttaaatctaatgttggaatgttatgtgctctattaccatattttaattttaatgtctttgcacctgctgcaagtgaaagtaattgatgacccatacaaatacccattaatggtaaatctggttgttccttaataacttgttttaaattttcaacagtttctgaacaataaattggatcacctggaccattagagatgaaaataccatcaaatttatctgcaactttttgaattggataattataaggaacaacagttatttctgcgcctcttgaaactaaacatcttaaaatattttcctttgcaccacaatcaacaactaaaacatgatgttttgcatttttaactggaatatggaatggttcctttgttgtaacttttgcaaccatattaactaaacctggatcataaaattcttcagatttatcattaccaatacttaatctagctaaacttgaaccttgttctcttaaatatgaaactaattctcttgtatcgacacctgtaattgctgcaacattttctcttttacaccaattacttaatgattcaactgctgtccaatgagaatattctaatgcaacatcagtaaccacaataccaacacattgaatatttggtgactcaaagtattttaataatgtaaagtcatcacgagcatttccagatggaacaccataattaccaattaaaggttgagtaaaacaaataatttgtccacgatatgatggatcagtcattgattcaggataaccaactaatgaagttgtgaaaactgcttcaccagatgcactatttggtgaaccaaatgaaagaccattaaaaactggtccacctttgataattaattttgcaggatctaaagttgtagttgatgaagttgctaaagatctagtgaagttagtctttaattgactatataaacttttctttaaagtattaaatgcgagcatgttgttaggtttgttcgattaattagataataactaaattaaacaagatgttaatctacaagaaatcaagtagttcaacatccaagtctttattggaaaatttttcgttgacaacttttcttttttgactcattttccaaaatgaattgagcggaccgcgctgtggaattacctaattcggtaagcgcgcttaagactgtaatcagtaagttaagtgatgtcacttttcctattgatttcttaatgcttttggtgacttagataacgattggaaggtggaagctgtaaataaaaacatgtttctccctaattagatgaattcaaaagaattttgaacaatttaatggtgtagacttagcccaattaatggagagacaaaatttgtaattatgtatgcaacttatattgtaattttccttaaaaagcaattgaaaaacaccattataacggttttgctgctttttcaatagcgtttgacacaattaaaactgttaaaaatgcaaaaacaagtaagttttcgactaatatttatcttaatacatttttgatttcaaaatactttaatttttcaaaatcaaaattaatttaattaaaaaatttcttactactttttttccaaaagcttatgagtatcttataaattaacccagtcattctacaatacttttaaactcaattaaacaactaaaacaagagtaaaatacctttcacagtatgtctacactaaagatcaaaacaggcacgacacgtttttatgttgtacatcaaacattaccaagaaaagcgaatttttcacaaaaataaagtttccgatgccctcgtattaactaatttcttactgctttccccttaatcaccatcctttaaataaaatgattacaatggttaatagcaggtaaacattagaaacaaaatttacaaatatttcttttctataataaataatctctaaaaaagaataaaagcataaaaaagtaaattaaagcagcaattggagctttttgtcccaatacaaacaaccattttgcttgatattaacacaggcaagcacactaaagttataaataaatttatatgatcaacaatttcctaatttagtgatatcacacttcaaatgaaatgatatgaatatattatactcgtatcaagaatttagttctatagcaaatcatgtgtttaaaagaaaggtgtctttaatgattgggtaggaatctataatataatgatgattttgtgaaacttttaatccaacaatttcattatcttcaagccaaacacatttagtttcacgatttgaatgttctaatgaaatataactaccaattgaaaatgatggtctattattattatttttcctaaaattagtatctaatctattttccttaaattcaataagtaattgaattttttcaattttttcaatttgatatcttaacacttatcattgaataaatatgaacatatttccaacttgttggaaatttaattctaacaaaattattaatgtcattggttcttttaggtatgattattgtagagcgtgtagtaaaactttcaacattttcaataattaattcatttgaactagttattgaatttttgaaaatgaattcttcaactttcttgaataatttaacatttaagtcatccattgaaacttttttggtctctttcaattgtatatccatatactctaatgaatctaagttatacattttaagataattaacgacattgattaaattaattctttcatgaatagtatctactccatcagtaccattatcattatgattactaaaaacttcttcttcactattaagtatttctgatattggatcagtcgagtttctaagtttatcaaatgataaaacatttaaacaaccatcttgctcccatttagaaaataaattaattgtataagacaatgacattttcaaaggctcaacaacatcaataaattgttcatccttaataacatgcattaaatcaaaattcagcttattcataccatcaactaacaattccatatcaaataaatctacgtattgacaaaaaaatattgagatgtaagaattatattccaccaagagttcaagaaatgtgaataatttttcaaatttgagatttgacacaggtgttttagttgtaaacatttgattttgaaagatatttaacattagtgggaagattgattgaatcaactgaagttggtcattgttgatatttaattggttaaagttattagaaattaagaatgataaagaaaatggtaaacctacctcattaccgatatcatccaaattgagtgcaatttttttaagacagttgctgtcaaaaaagtttaaaataattctattgaagggaactagaataccattaaaaaatattttattaaagattgtttcattattatcaaataatagatttttttcagagttgaattgtttaaaattttggaaaattgaatgtgcatgatcaattttatcttcaaccataaaatataataatcttactttaattgaatattcatgtttatttataatcattgaaacaattttctttcgaagcatatccacatatgttgaaagatgagataaaaattgtttattatccattgttggattcaatgaattataaatcccaccaagaattagaaattcaggtttgtattttaaagaatctggtaattcatttaaagcaaaatagagtaagctaataccgttatattctttaacaattaaggtaaaagtgaaaacaaaatcaattttaaaatcagctaattcatgtaataaatttcgataaacattgctattttgaatagcaactggataaccatcatgaatatttgtaccctttttaggttttaaatttttcctaaggtaccttcttaattgtttatttaacagtatagcaagaatgtaattatttagtaaaggtaaagatgaatcttttgaatattttgaagaagttgtagaagtatcatcaattaaatcaaatgacttaaagtataataaattattagaaaatgttttggaacctaatattttatccggtaggttattataataaataaatctaataatatttgggagtgatatatttttatgatttttaaataatgttaaacacatttcatcagcaaaagttgtaaaattttttatatgagttgttgaaacacgtaaatggaaaaatagtttcgtcagatttgattttctttttacccatgtgagttgctttactcttattattcttattcttatcatgcaccattcattatcatcattattattattattattatcgataagattattattaattgattgattattaggatttatttctgtaaatttacgtacttcatattgaacataattttgagaatcataatttgattggaaagcaaaattgggattaaacaaatatgattgatcaaattgtgtactgttattaaatcctattaattgcttttgatgatcatgatgatcatcattattgattgaattttcattagtgtgaagattatgattttcattatagtctatatgactatttgcagaagtactaacgtaaggtaataaaatatcagaattacagtgattcttttgaatgtaattaatgggagatgaacttgatgggatgatgggctgttgatgggatgacaagtggtagcggcgtcacctgatcatgttgatgttgctgttggagcgaaagttgtggcttccatgactgatatagctgattttctatgttattattatttaatgaattatttggttggggaaatgaatgactatttgtttgatctacgtgttgatctattgtagtagagaatggatcaatgaaagaaggagaaaaataattttgaaattgaaattgatttgaatgttgattttgtattggggaattattattttctgaatttatttcagtttgacttttagatagatgattctaaggtttgtaattgaaattgtttttccaaactcatctctaaatccgtgttagaattttcttgtttattctttgagcgataaccataatgattccatctcattatgagaatgttttcatgtatatagagctaaattggcagttgagaattaattaaaaagtatgtatagtcaatatcaatattgtatcttataaatatatcttatctaatatcttatattaaaagattgtaaagttatttagacatgaaagtttgtaaacaagtgataaataacatagtataatatatagggggggggggggggggggggggaatctcgatgagagtaagatttgtaagaaattttggaggaacgaagtttttaaattaaaaacgaactcgtaatacttaatagaaacaatacaaaattacaataaatttaatagaataatttaacaatgtaacccgctaaggattaatagataaataacaaaaaatctgtaaacaagctattttttgtgaagacgtcataggggatggaaagaagcaattttatttctttttacgagtgttacatactagaaattttataattatattatgtatcgaagtaaatctgaataaaggggaatcatcgataccccgttatctttttaaaagtctattgttataatagaaatgaaatatagaagaaaaaagaaacaaaagggagtgtaatatgaagataacgtttaagcgttgaaagccatgtatttaaataaggagagtatatgttgatgtagagtagtagaaaatttacgttactgggcaatagagaactaagttgaaattaggtttatgatcaggatattaatctcggcattgagagaatttctgaatgaaatttttaattttttttaaagggtttaatcgatgctctatttaggagtccgactgtattggtatattgagaaaaaagctaggcgttagttagttgataaatacgagaaactaagagaggaattcaaaaaatggatgttagaatgaaagtaataaagaactacttgaaataaatatcgatattaatcattaatcattaatcaaggttaaattcaattgattcaaaaggtgtagataagtaatgtaaaagacaaaaatgataataataaatttaagtctctaagcccccttgtaaagagttagttacccggagtgagaaaagggaaaaaaggacgcaaataaaatttcaaattttcagagaaaccctcgaaaatttaattatttgaaaatttttcactgagaaaagagtgtgttgtgaggatattattataattatagtggaatttgctctattacagtgttttatccacttttatatttcatttattctattctccttttattcccttcttcctttcagtgcaacacttagtgttaattaactagtaacttcaatatgtctcacagaaagtacgaagaaccaagacacggttccttaggtttcctcccaagaaagagatctgctatgcaaagaggtagatgtaagtcattcccaaaagatgataaatcaaaaccagttgctttaaccgctttcttaggttataaagcaggtatgactaccattgttagagatttagatagaccaggttctaaaatgcataaaagagaagttgttgaagctgcaactgttgttgatactccagaattagttgttgtcggtgttgtcggttatgttgaaactccaagaggtttaagatctttaactactgtttgggctgaacatttatctgaagaagttaagagaagattctacaaaaattggtataaatcaaagaagagagctttcttaaaatactctcaaaaatatgctaaagcaggtgaaattgatactgaattagcaagaattactaaatattgttcagttgttagagttttagttcatactcaagttagaaaaactccattagctcaaaagaaagcacatttagctgaaattcaattaaatggtggttcagtttctgataaagttcaatgggcaaaggaacatttcgaaaaaactgtttcagttgattcagttttcgaacaaaatgaaatgattgatgctattgcagttactaaaggtcatggttttgaaggtgttactcacagatggggtactaagaaattaccaagaaagactcatagaggttcaagaaaagttgcatgtattggtgcttggcatccatctcatgtctcttggtcagttgctagagctggtcaaagaggttaccaccacagaacttctattaaccataaagtttatagagttggtaaagcaggtgatgaatcatctggtgcaactgatttcgatagaactaagaaaactattactccaatgggtggtttcgttaaatatggttccgttaacaacgatttcgtcttattaaagggttcaattccaggtccagttaagagagttattactttaagaaaatcattatatggtccaaaggatagaagagctttagaacaagtttcattaaaatggattgatactgcttcaaacttcggtaagggtagattccaaactccagctgaaaagcatgctttccttggtactttaaagaaggatttagaaaactaaatctgatgtctttattattattataaggaaatcaactctttttttaactatctctattatttaaaatgattgattagtttactaattttttataaaattttgtaatttgtttattatattaaattgttaaaagataagttaaagtatatcaagtatatccttcttttaaatttgcgagaagtgtccacaataatccgattattacgtattatctgaactattaattcctaattccatgccatacaatacgaaatcaaaaaattttctcggtggtgagagtgaaaaatttttcatttgtgaggaaaattgccacttgttatacagtgttttaatatagtggatttttacctcttctaaatcttctacctttgatctcttgtaatgtttctttgcctttctctattcctttttatttataatctatttcgattcctattggaaacacatataattgtataatatgagtgaagaaaatacaaaaccacagacaagatcatatgtccctcctcataaaaaaggtataaaaccagttcctggctcaactcctttatcatctgaatcttttggttatgaatcaagaagtaacagtggttatggtggttatggtagaagagatggtggttacagtagcggtggttacggtagatcatcatatggtagtagaaataatagtaataataatggtggtaattcctcaagacctccaagaggtcaaggtagatgggttgatggtaaacatgttccagctgcaaatgatccaactttagagaaaactttatatggtgaagaaggtgattctaagtttcaatcttctggtattaatttcgataattatgacgatattccagttgatgcatctggtgatgatgtccctgaagcaatcactgaatttacttctccaccaattgattcacttttattagaaaatattaaattagcaagatttactagaccaactccagttcaaaaatattcaattccaattattagtactggtagagatttaatggcttgtgctcaaactggttcaggtaaaactggtggtttccttttcccagttttaagtgaaatgtttaaaaatggtccatctgaagttactgaagacaatagattttctaaaaataaggcacatccaaccgcattagttttagctccaactagagaattagcttctcaaatttatgatgaatctaaaaaattcatttatagatcatgggttaaggcaacttgtgtttatggtggtgcagattttactacacaagttagaaatttagcaagaggttgtgatttattagttgcaactcctggtagattaaatgatttattagaaagaggtaaaatttctcttaaaaatattaaatatttcgttttagatgaagctgatagaatgttagatatgggttttgaaaatcaaattagatatattgttgaacaatgtgatatgccacctgccaatgaaagacaatcattacttttctctgcaactttcccaaaggaaattcaacatttggcaagagatttcttaaatgattatattttcttatcagttggtaaagttggttcaacatctgaaaatattacacaaaaaatcatttatgttgaagatggagataaagagtctacattactggatattttagcagccgatgaagaatcaggtaatggtttaacattagttttcgttgaaactaagagaatggcagatattttaagtgattatttatattcaaataatttcccagcaaattcaattcatggtgatagaactcaaagagaaagagagaaggcattagaaatgttcaaatctggtagagaaccaattttagttgcaactgcagttgctgcaagaggtttagatattccaaatgttacacatgttattaattttgatttaccaggtgatattgatgattatgttcatagaattggtagaactggtagagctggtaatacaggtgttgcaactgctttctttaatagaggtaataaaaatattagtaaagatttaattgaattattaactgaagcaaatcaagaagttccacaatttttaagttcaatttcaagagaatttggtagaggtggtccatcaagaggtagaagtggaggttcaagagatattagaagatctggtaattatagaagtagtggtaattcatcatacggtaattcatcttatggtaattcatcaggtggttatggtaactcatcaggtggttatggtagtggacgtcaatttaattcatcatcaaacaccaactccaattcatcatcatcatcatcccaatggtggtaaacaaattgagtagaaaaaaaaatcatataataaatcaattaattttcttattcatttaaattattaactgatttatttaaaatatttttactttctattcattctttttgttcaatattttatttttattcaacttatttttcttatttcttaatcatacaattttttattcaattttattcaatttaccttttttggaacttcttagaagaagtatttgtttcaatttcaatttttcaaaaatttcaattcaattttgaaaatttcattcgatgacaaatttagggtgaaaaaacttttaaaaatatttgttttgatgattaaaataaaatcatttcaattcaattcaatctaattcaattataatatatatcatcaatttattacaattattttcatttcaaattaaatttttcttccaattataaaacaaaaacactacagattttttccaattcatacaatgaattttttaatctgtaatatgttacatttgaatcttttctacctatacaagtacatcggtttgcttatttgcgttacaacaatttttttttcttcatattgaatttcacgtacaaattatattgcaacctgaatagttttaatatttatgatttcgtgttttatttattcaaatttttttaaagggtaataagcattttttatctaattcatatagacacacacatgtctattcatcatttcattctcatagtattctacctatttaagttttatataaattactttgtgctttttctataaatttatagaatttccaaaacgttttttgttatgtaacaattcaatctttgaatataacaatagtttattcgataaatattaatataatcaactgatttgtgattatagtagcaactaaaaccatcatcagatggattaaacattgctttgatcaatgaacaatataccacattgtgtatattttagaacttaataaattcaatgaagtcttatgacgtaattgattataaaaaatgctatagactactttccaccatgttttatgtgattctctttctatatattctgtacaatgactctccaaaactttgttacagctatacaaagtgggtctactgtattccatccaaccaccgacaaccacatatcttatacataccttactataaagctcaaacaggcaagtagaatactctctcagggaaagagatggagacgcggctgtaattgccaaatagagagaaaaacggataatttccaccctttaatttactatgtaactatgacggaactgtaaaattgcttacatggaattatgaaaggagtttgtagacctgggaactgtattttctttctttccaaaggagagcccttgtactgatatattgatctattgtttaactaaatattcactgaaggtactcatatcaccttatctatattctcaactatataatataccttatagtacagttattttatcaaagaagtttattcacaattggtacctttcctttcattccggaaaaattaattattttaaaacagaatttttcactattttagatccaatcatatagataatacacacattcacaggaatcagcttttattataattcttcaatatgagttcaaataataagaataaattatcagttaatgcacgaactaatccaaggttcggtcatcgtaaaactcaaagtagttccggtataggatcttcatatgatgatgtgtctgatatgcaatcaatttattcaaataattcatttagttcagttggtaatttaatgtcaaataataataattcattttggtcattaaatagatcaaacgaatcacttcatagtttacctgatcaatttcaatttaacagtaataagaaatcaacgtcaaatatacccaaatttaaaactaaaaatgccaagaaaaatttcctgttaaacttaaagaataaaaataaacaatcattaaaatataatagtagtactccaccagcaattgattctcatattatagtggaagatgatgaaagtgaacaggctttaaatgttccaatgttacctgcttttggggttagtggtaaacctaaaaatattatcaataaaaataatataccgccgccaagatctgctgttcaacatgattattttggtaattatccaaatacacagaatgttttcagtgacaataataaaataaaagataataataatacacctgattttggttttaatgatgatgatcaaatatcaaatgaagaggacaaaatcataaaatctatgatagatcaagattttaatttgaatttctcaaaagattctcaattaccaaaaggtagtaaacttcaagaaatcagaaggaaaagagggttggttgaaaaaagaccaataagcagattaagtagtagtgatgatgatgcctcaactgagggtgaagaagattatgataatcaaccacatgaatacgtttcaaataataatgataacttgaatgataatacatctatcaagtctgatacttcaagtaaatcaaagaaaggtatattcaaatcatttcttcgtaagagaggattttcgatcggttcagaaagtatgaaaagtgggtctggtgaaaaaaatagtctggaaaaaatagaatctccaactatgggaagtccgttaaaattaacaaaaacattaagtaggagttcttcaagaaaaagaagaaataactcaatttcaattcatgaacaactggatgattgttcaaatgaaaaaattgaagatagtacaagtttatctgaaaaaaatgaaggtacagaagcaataaatagtattgggccaaatgatatctccgatgttggttcaaataacagtaaaagtgaacattttctgaaaaatattttccatctcgatggcctgttaggacaaggtggtttagtgcctaatttaaatcttgctcataatcaagatacaacaattagaagaggtgatcaagttcatgatgtagaaaacccattacctgatttccatgatgaagttgaaagagaagcaaaaactttagttggtcatatgtttagtagtcctctggaagattttagaaaaaggacgaaaaatcgtacaaataaaataaaaaattcttttaatggtaatggaggaaaaaatgcaagagatacaacaaataatatatctagaacatctactggttcaagtactggactttacgttcctgaacgtgctcatttgcctgttgatccttttgatgatttacaaaattttgatgaatttagtattgatgttcctgataatattatagataaaccaagaaaatataaaacaggtattcaatctgctcttttacaactttataatactcatctgatgccagcaaatatttcctcaacaaattcacttgaaggatcaacattgtataatgattcagatgtcaattatgattcagatgctactgatttacaaacagattataatctgaatatgaacctcgatgctgagataagaagagacggtttgcagatattacatccaagctcaggcggcaacacttaattctgaatttcctgaatttgaagagaagatgaaaggtatttctgaagatgctgaagcaaagtttgataaaattgataaattctccaaattccataaaagagcagcttctttccaagattttattgcaaaacctgatatgaaaaaattgaatatctctaatatgtccagttcaaatccaaagagaaaaacaggtgtaagttttgaattaccagattttagaactcaaacaaccacagctgatacaccattggagaaaaaggaactattagggtataaaaatcttaaaaaaagagcaaaattcaatagaagaattaaaaaggaaagtgcagcacgtattacagttcatattactgatgttcttgaaagacaaagatttattttaacattatgtaaagcatttatgctatatggtgctccaactcatagattggaagaatatatgtcaatgacatcacaagttttagaaattgatggttcctttatttactttccaggttgtatgttagtatcatttggtgatttgaatgcacgtacatcagaaatgaaacttgttcgttgtgcccaaggtttagatttaggtaagttagatgaagttcatgacatttataaaaatgttgttcatgatagattaggtactatcgaaggttataaactattagatgagatcatgaataggaaatccaagtttaatgcatggtggtgtattctattttactcattagcttcactggctgtcgcaccttggtctttcggtggctcttgggttgatttaccaatttgttttggtattggtgccgttattgcatttctacaatttgttatttgtccgaaaaatacattatattcatctgtttttgaagtttgttcaagtattattgcaagttttatagctagagcaatcggttcaattaatggtgggaatactttttgttatgctgctttagttcaaagtccattagctttaattttaccaggttatattattctttgtggttcacttgaacttcaaagtagaaatattgtggcaggtagtgttcgtatgttttactgcttttatttattcgttgatgctttcttttggtattactttgggtgctgcattatatggctggattgataaagatgccacttcggcaacttcatgttcttccaatatttctccttggtatagatttttgtttattccaatgttcactataggtattgcacttacaaatcaagcatcttggtctcaattacctatgatgtgtattatttcaggttgtggatatgttgttacttatttttcgtcattacactttaagaatgttacagaattaaatgctactttaggttgttttatcattggtttggttgcaaatatctattcaagggcactaaaatcattcaataaatacttcacaacaagaggtacatttatgactgtctcattgatgcttcccgctattttcgttcaagttccaagtggtattgcatcgcaaggttccgtttttactggtattagtactgctaacaatattactcattctaataatgctcaggatgtttctggcgatagtggtactttaagttttggtattgttatgattcaagttgctttaggtataagtgtgggtttatacttaagtaccattttggtttatccttttggaaaaaagaaaacaggtttatttactttatagatttttattaattgtattagcatttcgtaattactcaaaagataatgattgatcaattaattacattaacattaaccagtttcagaataataattttgtataggttacttatataaaactcaaataaatttaaattcaataactctcgtagattaaagatttaactctgtagtcttcgtttgcttcttctatatcttcccaatttccaataaaatcatcctttcctctgacaataccaggcaaagttttaccacccgagtaacgtttccaaacatttttagcctcaggatttgtacctaaatcacaatattcaaatttgattctgttggcagttagaatagtttctaaacgattagtacgagttgcaacatggaatccaccagcaaatgatgtgtataaataaacaggttcatcttcaaaagtcatcttcgttacttttggaacatggacggaaccatctttacccagatgcgtatttgaatcttgaagagccttttctcttgcagcagcagcaattaaagcgtcgatattgtcttctttaggtatacttacaggttcctcttctaattgatgttcttcttctttttcttcttcttcttctcttttttctctttatcactctccagttcctctttagattcattttcaacatgctcatcatgaaccttttcaatttcttcgatttcttcttttgattcactgagtttagaaacattttctacgtcattaactggtgattcatttttaatttcaacaaagccagaaatatcattcagtttttgcactttcagtagtctgttttccgactactggggaaacatccggtagaacattaacaaaggattcagtttctgatacacttgttttgatttctttagggcttaaaggttcagtttcaggttcttttatctcttctgatgttattgacttagttccatctttggcttgttcaggttcaacttctttatgtacctgtacaacagggtcaacaatatcattatctgcattaacaacttccttttgaacatgttcattactttccaaattctcaatttttttagacttttcttcagtttcaatttttggttcagaagttgtatcgtcatcattatttttcacatcttgatcattgtcttcttctagtatttcttttgctggaagtaacttttcgtgctcactagtattgaatttttcctcagctggtgcctcttctacttcttcttcttcttcttccggctcaagaacatttttagcatcttctgtaatactactttctataccatcatccttttgttcttcttttttttcttcttttttctcttcttttggttcttcttcctttgatttttcttcctttgaatctccactcacttcttcattcacttcttcattcgctccttcacctgcttcttcatcaatagctgtatcatctttttttgtattatcaccttcatattcatcctcatcttcttcatcaacatccatcaattgtaaagcggtattggctaattgatccagtaaatcagaagtactcaatgttgtgcgattgctcgcatcttcttcctctgcaacttcagctaaacccttttgtagatcttttacaatatcatttgatttggaaatctttttaccatacttgactgaatgagtatcttctacaaaatctaaagctttattaacagcatattcaatatctggagcatttgacatttcatcatcattaattaatgcaccactttttcttaaatctatactttcaagacgatcatcattggtaaatgatttacgttctttggaaacccttgaacgtgatcttgaaatagaacgtaaataacttaaagaggaagagctcgcaatttttggagctgatggatcatgtcttggtcttctttcagaaactaaactgttggatgatttgtcataagtttcagtaattgcattttcaccatttaatccactatgaatagattcacctcttgctaaatttggtctactaaatgaatcttgatttgaaaggtctggtcttctagaagatgatcttgatttttgttcttcaagtaaaatggattctgaaccttctctcattgccgctggtgcagtgaaactggagtcagtctcaattgaatacagtggtacttgtggatcggctttcttttcacttatttcatcgagtgtcagtgcttttgccggaggacaaataatatcagcaattttatcgtcaactaaagtagtggccttctcgaactcaccttgattaacaacattaataatatcatcaacactacgcatgttatcaggctcaataaattcatgtgcctcatgttctagttctgaatgtttgccatttttcttttttgtttgatatttgtaattactagcaacaccacttgcaggaacaatatattgttcagcatttccacctaaaatactgatttttttaatatcatgaatgttatcttccttttgattaatattattaagttcaattgtacttaaaggtgtagccttagtttgatcttccttcattttgataacatcaggaatggcatcatttttaatatgtccatcgttatctaaaacatcgactaaaggaacatcaatatcatcattaagtaaagcaccttcttctttaatttggtcaacagaaactaaatctgctgtagaatcagttgctttataaacaaggtgattgtgattatggggttgctttgaacttaatgatttcaaagtggggatagtatcagaggaatctctaattgaagaaccaatcaaagatggtgtttctgctctatctgtgtcattaacttcattatagccatccatttttaataatctctattgctatatatacaattatctaccaatgtgcttgctctatacaataataataatatgctgccgtattatacataaaaaagcgcctgtttcaaaatgtcatgatactgaggtatacgcatgatcccgagacagccacaagcgtttcaaaaatattatctttagcaaatctcatcgtcgtcgcaataccttcccgtttaggatggttatcttttgataattatcgatgtttattatcactgctattaatcactaactctagctaatatctcactctgaatagtataccgattcatgtatcaataaactaagagataaactttatctgattaactttatctgattaactatatattttaaatataaaacgtttttttttataaaatgcatgcaaaaatttgtctaacaaattcaaatgtataaaaaatgctactaaaatgtttatttagcttcctttggagcaacaagagactcaatcttagcaattgctttagcaacatcttcagccttacccttaacaacaactgcatcactttcaacatcttgtcttggaactaaaactctaaccttaaattcttcttcaatacctcttctaacagatccacctgaaccaataatcattctatgttgtttctttggaacttcaacagtttgttcagtaatactttctaaatcagcaacaattttcttaattgcagtgatgatcttaccaacaactactttgtcaccttcacatgtaatagtatgagaatctgaattacgtgcagggaattgaatgaaacgtctgaaatcacgatcattttctgaaccaccagctttaatgattaattcacgcatagccataccatttggaccaataatatttctataccattttggatcaacatcaatagtttcagtaacggtattgacaatacgtttaacaattgcatcaatttgagcctttgcttctttgataccagctttggaaccaataagttcaagggtagcagtactactttctttaccttcttcactttgggcgtttttagagtaaatttgaatacctgcatcaattgcaatacccttgatgttatcaccatttttaccaataactcttggaagtgcttcagttggaatttcaataaattcagtaaaaccattttccttttcatatgcaataagttgattaatttcttcttcaactttcgcaacacctcttgatggacctctgataacaacattaccattcttttcatcagattgtgaaaattgaagtttaacattgtatttatcttgtaatctgtttgcatagacaccatttggaccaattaattgtttacggtatttttgttcaatattaatgatactagtcttttcatcagcccatctctttgctaattgttgaattttcttgatacattcatcaacatttgattttaaacctgttaatttaatttcagtattttcaactttatcattttcatcacccaagacatcgattctgatattgaattcatccttaatttcatttaagtgtgcacctttttgaccaataaatcttggtaaatatttggttgggaattcaatagtagtattgtattttgatgcttcttcataatttttaacatcttcaattaactgtttaatatcatcaattgctttactaatttcagtcttgtaacccctcaagtaaatttcattatcagaagaaccttctaagttagaatataacttgatttcaatagtattatcttcatatttgtttaataaaaccttcaaagtattaccttcaagatgtttttgatcgtcctttgaagtttcaatgacttcggtaattaattcattgtttaattttcttaatgaagcaaatgaattatcaacattatccaacttagcttgaatttgttctgctgatggtaagaattcatcatcatcttgttgaacaactaataataatttattaccaaaacctgctaaggaacctaatggaataactgaaacattgttttcaattgcaacggtattatctattttagggaaaatgaatgattcaatatcttcaactgacttaacaaaatttggagtaattctgttaacagtatcaacaactgcctttctaagctttcttgatttcatccttttgatcctttgatgcactaaatgaaactaaaacattatgaatatttggatccgctaagttagcatatgatggaccagcaatcttaataccatattcagaaccaagagattcaaaaagtttggtataaataaagaaagcagtcagattctttgcatgttgatagttaccaccatgagatttagaaagatctaatgtgtcaacagtatattcagaagttaatgatcttgcaagttcaatagcagaagcaatatctgattttaaaccaatgaatttaactttgagggaggtatcattatcctttggcacttcaacaacaacattagtttcaacgaaaatcttttcagcattgacaaattgatgtaaatgttttggaatgtcacgttcatcaacaataattttgttatctaatgtaactaataatgtcttaatttcattacgtgcttcaatgacaccttctcttggaccagcaattaagatagttgaaattttagaggatggttcaggacaagtaacttcaacgtctttatcaaatgataattttgcaacattagcagcaacgaatggtttaaccttttcattaactggaattttaacatttaaagttttaatgttttcattaacaatttctaaaattctagccttagcatcagtacaaccttgaatatcaccttcaacagtaactaatagagatttaccaaataattcttcattttcagttaataatgatgaatcattttcatcatcattatcatgtgattctttagcaatatcaattctaacagaagtagcttcaataattggtcttaaggttttaccacctgaaccaataatagttgatcttaattttgatggaacttcaaaggtaattttagttggtttagttaattgtttaattaattctttctttgcaagtgcaacattttcaattggaccatctaaaagaaaagttcttctcttagtggtactagaataagtagattcgattttaacatttaaagaagcttgaattttagcaaagattttgaaaatttcaccctttgctaaattttgttgttgttcatcatcaataataaaagtaacttgagtagaagttgatttaacagcttgtttaaaagaattcttgtttgcctttaaagatgaagcagcagtaattgaaggaccccatgaagaagcagttgaattactaccacctaatgaagggaacagaagatcatcattcatagtaacagctttagttgtttcaactttagaaatttcatcagctaaagtaggaacattttcaccatcaattgattcatcagtattagatgattgaacagttgatggttcagaagtaaagacagaggattcagtagtagtagttgcagattctaaaacaggagattgattaatttcttcagcttgaagcgcttcagcgtgtttcatagctaataattcagcaggagaagacatttttgttcaaaaaattggataataataggatataaataacaaccggcaaatgtagtaacgtaaatggatattaaaattagtttagacaataaatataatttcaatctgtaagtactttaatatgatactttggatagaagtgatagttttcttgataaaataataaaacaaatgtttttcaattaaaaagaatgtttatagactgagatcaactaaagagcagctagagaaagaaatataagtaaaatttaaagaataattgaaagaaatcagaacagaaattcagcaaaaagattcaaatagaacgaaatcgatattcatgtcctgatccgttgcaaacgcaatagcacttgattaactgtggccaaaatttccatcactgtaaactttattacgtggcactgtttgagtagtggtgtacagattatgtatttcctaaaaaagtatcacaacatctagcttgtcgtggaattattatcactctttggaatcattcactggttaatcattgattaatgatggatacgattaattacatcttttgaaagtacgaaccaactagaaatccaatgacatagacacatcctttacctatcgctaatgatccaatctcaccaaacatggtaagtatcgcaggaccaggacaaacaccagacataccccaaccaataccaaagatagcattacccatcaaaaactttacatctgtagcattactgaagtttaaatcatattcagattcaaaagctggtttttttcttatagttgtttcccctttatttgattcattaactactttttcaacattctcttctttagaatttggtaagtattttttccatattataatattaggaatgatacagaataatggtatcattgctaaacttggatcaaaatcatgtggtgaaaataatgataagaagcccgtaactttactagggtttgtcattcctgatatcaacaatccacaaccaaataaaaacccagaactgactcccaatacgcctcttaatatattcttattcttcaatctattaaatctctcttcttcaatcaaagatcccaatcttggtaaaatagaatacgaccataactgtccaacaattaccaatgtaagaagtaatacccaattttctttgaaaacgacaaattcatcatcataccaataattaggttctttatatgattcaatttgcttataattgtttgtaatccatgtggtaataacaccagttgtaaagaatgtacatgttgcaataaaacttctccatcttagtcctactcaaccctgctaacatatgtccacttgtacaaccacatccggcacctagtgccaaaccccactaaaagaccaggaaatcaagtaactcagtgcagatccatagaaggtacttgtttttgttactgctggagaataagacgaaacaaatacaggtaaattatgcttaacaaactgagaggaaagtagtaatcctgtcaaaattgaaactgaatgaatattgggtctaaaaattgaattgtataatacggaagaaaatccaatgactttaccttctaaaaggatataggaagtagtagcagcttgaataagtagtgcacctaatgctgattcaattggcgtgaacattcttcacttagtaaggaagaggttaaaatgatttgtcattaatgatttagtattaaatcgaattttaacttcaaacaattatttcggagaatggaatatatcggtagggggtttgaaaaggtttattacagaaatttcattaatacttaaacttactttaacataatatcaaattgatgatgtctatataatatttcattttagctaataaaagttacatagtaggaaccatcttaagctctaatttcttcttcccattggacaccacaccattcttcaatataagcaactccattttcatccatccagtttaatggtacaacatcttcagaatcagtagcaacaattatagttccccattccataccattcttcattatatgtgttatatcattaatatctctttcaagatcaataatcatctttggcattaattgtaattcaaaatgacgatgtcctgatggattataatctggggatggaatgttccattcagattgtttctttaattttccattaccttcgtaaaaaatattacttactttatcctttgaagaatataaaattggtgatcctccaggttcatatcttacaacttgtgtagtattataagataaaactctcgtaaaattttggaatgtttgatcatcgaaaagtttagcaagatcttcggtttctttgtttttttcaggattgattttaggtaagtttgcagattttacattatcagatgatgtagaatcttctataatagtaccttcatcatctatttttaaattatcaggtaatggagctagaacttgttttgatgagtctaatttttcagtttcaaaatatagaatgaaacccttaaattccggtaatttgtagttcacttctttcttctcaacttttattttatcctttggttttatattagatttagcaacttcggaaaatgttggaattttagtttcagaattgatgtcattaacttcttttttcaaattattagtttcaaacacatttttagaaaatggattatttgtacttgaaccaaatggattagcaccaaaaggatttgaattttgattatcattagaaccaaataaatttttaactaaatttttagtttcttcttccttttcagtaatcttttgttgttttattttttcttcttcaactttctttttttcctctgattctctttgttccattatcaatttatcctttttgatacctctaattgcacgtattgaaccatctttacgacgacatgatgattcaacacaaatgaaaacgtataatgcacgatcataccaagtgcctggtaaatcagcactacattgtgttaataatctcattggtttggaacatactttacaatgaacaaatttagatggtattggtgaattaacatctattggaattggttgtcccccaataaatgaatcttttggatatactggttcctcttttgatatttcaacatcaacataacctagtaacgtatttgtaggtaactactgctgaagcaatagattcgttatcggactcgtacgacattattgtctagattactgaacgtagctgctactctctataatttgacatcaattcaaggttaagtaaatttactcagttgaataaaaatatttcaatttttttttcacagtcttgcgagagcattattacagttacatatttcttagcgaaacaatcagggtcctagcaccacagtgttataatcaaggctatgctttactttgaatatagggagctccacattattgaactgaaactaggtacattttgtagttactggagatatcgtaaatttaaggattatttacattcgggttgatagatactattattttaagaaacattgcatcattcagtgcccttattaatattttcctatttacacatattgagatcactctccggtaatatatacttatcggactccttcttttgattgtattttttgtttccaatattccattgctataattctactaaaaataaaccccagataagctcaagattagagggctactatctaataaacacacctttatttgttctcacgttttaaaagaggttaagaaaatgtgtatttatatcgttttattaggtgagttgctgaaaaaagttttaggttagttcggcatgtaatggaattttagtctcatggttatgagtttacaaattacatatgctatatattttcctttgaatgatttgtacaaatatctctttgctgcaaatggtatcacaagtctagccaaataaaataatagaggttcaattatcagaatgacgtcttattaatgagatgtgataagtaaacggacagaaaaataaaatcattttacctttctcagaatttaagctctaaaattctatacatcaaaaaatttgtcaaaatttccgtaaatgcaaaaaatgttctttactatagttcattaacactgtatatcatcaaaggttccttttgggaactgttctattgcttttaaaaacataattaagctgtttacaattatattagcatcgaagtttaacattttttaatgtacaaccttctaccccttaacgtttgaatcaaaaaagctttaatgttatacactaaaattgtattgcttatttatgttagtattcaatcaaaaattaataatataagaaatttatttgttttgccgtaatttgttttgccgtgaattttatatagtgaaaaccttgaaaaaatataccgtctgtgtaacttagttaatgttgataagataaccaaatcattattaattacctatttggaatttccattgatgtggtataattgaatgaaacaaaggtggggccagtttaacttgggctcgatgcgatgtttctaatatttttggctgtgtatagtaatttatcatagctatacttctttgcatgattttttaggtaccttacataatttggaataaaaataattaggttttttctatcaatgtttcatttcgttctatcaatgtaacatttctttcttttgacaacacacttcaagcttggatatcttttataggtaaaaaagtcgattgttttatggaagcatttcgttcaagttttgaaactctacttgttcttttttctttaacttgttaatattctaataaaaattctaaaatcatgcgggagaatatatcaaaatcagtatttttcaaagttaatcaaattatgcattctgactttatattaagtaaaccatttgtaaatctagctttactctaccatgaatttccaaatatcccgaaagtgtcgattcattttctaggtttgcagatgtctataaattcaggtgcatttctttgacttttagctgaattattatattctcctaatgattcaaattatagttttagttaaatattttaatttttgatttcaaacaacggtaaaaaaaattaatataacatacaaaatggatcttctatccagttttattttacagttacttttatttacaaacattataaacgctactgatattcaaacttctgttgtcggttgtgattttaatgcaattcagtcagagccaggtttcaaaggtgtcttttatgaattttctgattccagaacagatgaaatctcagatgtaaaattttatggtggtggctatcttactggtagcattgctggaactgcttccaaaattacagatatcaactttagtgttccaggtggtgaacaaaacatctatggagttgatgtcaactcgtccaatttagcaattgaatatacaggttacttcaagggtaagtactaataaacaattagttttcttttcataaattaacaaatactaacattacttatttattatagcttctcaaagcggtttacatgctttcaacttagctaaggttgatgatggtgctatggtttttattggttctggtgcttatgactgttgtacaccaggtgctatcccaaaaggtggtgccgatactgctgctttatattcatacaaaggttggaatcaaccatctaacccagttactacatggatttattttgaaaaagattctttttatccaattagaattatttatacaaatgctattactgctggtggtattgaactttatgttaccccgccagataattctgctcctttaaatattggtggtatggtttatcaattaacaagtgatcctcaaaatgtttgtactcctaaaactgttgttgctacttattcttctgcggtgacttatatttactcagatgatgttgctacaactctcactgttccaaaaactactgttattaatggtgtttcaactgtcattattgaagaacaacattattttacaactgtttcacaaaccaaaacatcttacatttctggttcttcaatttttacctcctcttactacacaactgttgttacagatactcaaacacttcctgcagaagttgtggttattggtgtccctattttggaaacgaccactgtatacacaaaaggtaccaggactttaactaaaacatcggtcgttactcaaacaataggtaccgatgttattgctagcagcattataattgttcaagagcctaacttaaaatatacttatatcccttctgatgtaactggtgttaccacaaccacatctgcttatacaacaaccatcaatggaaaaccagtttttacttctcaaattgtcgttattggcccatctgttagtacaactacccaattttacaatggttactacacaactacttatatgatcactgaaacaattacagtggacggttcaacttatacttctcgtgattatgttgttggtgttcctcgtggtacatcaacaacagtttgggatcaaggttcttctcatgtttacacaattactaaaacttatactaccacaggagcaactctaacatctgaaattattgtacatgctaacccatccatcagctacacttatacgacaggaactggtgctgctcagcaacaacaaacatttactagaacaatcatctctggaactaacaccagcaaatatcttgaagtggttgttatttatcctactccttatactacaatcgttgaaggtacgaccagcaccaactatttaaccacaagtaatggcaaaacatttgaagttgttgaaagaacaagttttcctatcactaaaacatttgcaacagttagtaaagttacaacaacgttcacccctatagtcgtcaacgagtcaactgaatggttttggcaagttatatacccaaccccctctactgttgttgaagaatggactggtctttacacacgccaatcaacaaaaactttatactatcaagaaacaatggttacaggatatgaagtagtagaaaacgtcccagtctactctacatctatttcattttggacaggtactactgatagaatctttacctcctttggtgtcacgactaatcaatttggaatttcaagtacttcaacctataaaattgtatggaaaccatcagtttcagaagagacatcttcttggagacgtacttatacatcaaccagttttaggacaacatataccacaggtccagataaattcccagtcactgaaacagatgttattattattgttccaggtactgatgttgtatcttcttggagtacaagtagtatatacggagaatgtaccaccgcagttacacatacttcttatgaagaaaccactattaataatacagtcacaacagtcggtgttgctattattagtgggccacacccatcatgttatgccccacctcctacaacaattagtgctactacaacaaaaaccgcaactgattgttcatctcattcaacaacaacaacggtttctacccaaggtcccgattatgcaattacagaatccattatagttatcatcgaaactccaatcaagaattgtaaaccaccagttactgaaacaaccacaactacggttccagctaccaattgtgctaaatccacttcaacaacatccaacgtcgttacagattccgcaagtcatatcacaactagtgttacaattattgtatctacgccacccacttcatgttactcttcatccaaaccatcatctataccatcatctataccatcatctataccatcatctataccatcatctataccatcatctataccatcatccaaaccatcatctataccatcatctacaccatcatccaagccaccttctaagctatcaacgacaccatcatcaagttcatttttcactagctcatcatacaaaagctccacctatatctcatcctcctcatctccaacctcttcaatctcatcatcatcatcttcttcttcatataaccaatcatctagctcaccatctagttcactatatagttcgtcatcctctatttcatactccagctcattatctaactcatcaacaacttcatcttcaagtgcatcatacatttcatcatctgttccatcagatcatttatcttctagttcatcatccaaattaacttccagatcttcattaccaccgcctgaaaatcacacagcaactatagtaactactttgacatccactgaatatgctcctgcaaatgactgttctttcactaccataatttccaccacttacttaaatgaatcaccatttatcgttaccgaagtggtagttgaatctgtttttactccagttgaatcatgtggtgtatatttaactactgaatatgggacaaactgtgaaacatcaacatacacaaccaacatcggtaccgttaataatgaaggtaaatatatcaatgctacattgatagttgttgagaatcctgcattaacctgtttaccaccaacttcatcatcgtcaccatttcctattcctgtcacacaatctaatacgtcatcatcattttcaattacaataccaaatgaaacaccatcagaaatttattcggttacaattccaagtgaaacttcatcacatccaccaattttggttactccttcaattgaaacttcatcaactccagctgagccaccacattttgcaacaacttctacttccactgcaagcacaacaactactgtttatacttgtactgaacctgagtgtcaaaaccaaccattgtcagaatcaaccactactcctcaaccacaagttacagaaacagattctcatacacaccctaatgattcaacaccaacaacacataaaaacccagatactcctcctcaaaatactgctacaaccactgatgttccaaaagagactacgccatccaatcctgatgtttcacaacaaactactgctccacctactgaatcaactcaaactgtaccaactggtaacaccccatacaaatctacaacattaactgaagaaccatcttcatctacgttcgcaactcaaacaccagatgaaccaattgtttccatctaccaaggtgcagcatcaagaccatatttcaattcgttattctcaattttgttcatgtcagtctcatacttacttttataagttaatgataccaatattttcctgttctttaaaccgaatagattttggatacatctaactaatttttcattccatttccgtcattcaaattatcaatgtttctatttcaaagttattaaacctttttagcaatcatcatgagatttctcatgacattttttgcatttactttattatttcattaaaattatctaggattaatttcattcctatatgtacgagtttcaatcaattcaatttttatttaatttctacaatgttcttatataatttttattatataacttttaaaccaatagtttaaccgatgcttactgtttattttgatatcaatttagcaaaattcccgaaaattcggcgctttttctgaaatgaaaaaattgcaatgaaatttaatttaacacattaaaactttttataaaaaattataaacgaaagatactttacattataggacttctgataacttcatcatccatatctgaatgatgcatgaaattaataaggtcatcaatcattgaaaaatttgcatcattttgagcaaatgatctatgtttttctgatgctacatgatctgtaaaatctggatacttgactctacaattttcacaatatcctggttttggttctcttttaactttttcccttctttgttccttgaataaaccgatcgcaatactcttttcttcatttgtatgtttttgtaactgtgtattaagttgagcaagtggattatcattcaattcattttcatttatggttttcttttgcaatttgttgatattctgatcattatttttgatttcattaattttttctatgttttttagaccattatttttaaggcacccatcacttataaaaggattatttgcggcctccacagaccgtaaagctgcaagatcatctttattgatactacttgcagttgaattttgtttttcttgatcaataagtcctattttcagggaagcataattttctgtattatcattacatctattaacattcacaatatttttatttgattctgattcctcctttgatttcgtcgttttactcattgaaggagtcagaacaacaattcttctttgttcatttgctaatcttttactaacaacttgtgatctacttggacctaaaccattaccagatagtgcattaccacttggattcataccggatgcttgaatacctgaagcagcaatctcaccatattcacataataatttaccatcattatttggatttgagttgcataaagtagccttcataatactatcttgacgcattaatttaggcatcacagttgaatcaaatgatggttttaaaacattactatgaacccttttatgattttgattattttctttgaaatccgtataaacgttatcagtaatacgcaaactcatcttgtcaataacgtcagatttatcagagattaaattattcaggtcctccatataattatcttcatcatcttcatccttttctatgtctaaatcattgttataatttttaaccttatatttaacatcaatatttttaatgttttgcacaatattagttttatccgtcaaaattcctttattttcaacttcattgacagtttttaagattttattgaaatcaccattaacaattttttgtctcttattttgattttgaaatggatgttcaacgattgaattctcagattcgatagggtactttatattattttcaaagagttctttgaattgatctttttccttctcttctaaggaatcgtacagctctttcaattttgtaataggatgctcattttcaggtttagtactgtaaaatgagtcttcccatgttcttttatattgaactctatcgttatattctggggtgtgaatatcttctctattgacaatatagttggaattatatgcagctactattatttcttgtctaaactggaaagtttcctccaaacattgaactcttctttgatgtcttcttagtaatgaaagagcattctgagatttagtttctgttacaaataatgatttcccattagttgtatgatgaattcttggaattgtatttttatccttccattctctgatgcatattggtcgtgtcttttcagtaatatcccatatgtacaaatattgattagcaaaatatttaaaatcgtttcttttgacatttgggtcacgatcacttggtccgaacaatttttcattcattaaaaggttatttaaattattattgatattatttaaatttgaattagcatttgcggctggatttgaattgctgctattattaagatcatcagtggtaggtacaggctctgataaatgatttaagaaacggtatactttaggatatgaccaaaccttgattgaagcttttttagctaatattgaaaataaatcaccagcaggataagttgcagttctatcaaattgacgttttgaaataacaattgtagttttatttgaataatctgtatcaattacagacccgagtcttttaaatgctagcattgttttcctctgatctttatcatttggatcataatgttcgtaataaatataactctttgttaaaatatctctccaattttccttccatttggccaattcatcaccggtcatttttttattagcaactttacctgttgcaatttgagttttttcattagtattattttggttaggatttaccttagtcattaatagagaaggcagatatccatctttttttggtgttgatgtacccattagatgtgggaatttatcaccagaactcagtttattaatatgtggaactaattgacaagctgctctctgtggtgttggtggaggttgcatcttaagctttcgtaccagactaccatctttgccctttgaaaaattatcattgatattattagcattgttgttgttattgttgttgtttaaattcactccaattgcccttgcagaaggcgtgtttacatacaaccgagatgtatccttaagagcaggtctgtctgtagacatcttggatggtcttttgatgaaattcaaagaattgattaatgataaaaatgtacaaattcaaaataatatctcctttaaaatgacaagaacggggatattttcctctaagagcatttgttacacgttaagaaaaacatttttccacagctgccaacaaaaagggaaacccactcgtttttttaattgaaaatacgtaatgtgacgcgtttgttcggaaatttagaaacatgcatccaattttcggaaaattgggagtttttcattcagatttctttccatcatgaattggttgctataagagggtatgtagtaaaaaatatatattaatttaatcttgaagttgatattgttttaatacaaactttgtttttgtctatcaccatttactaacaactattcaactttaataactatatataatacataatgcttcaaagcttactgttgcaacctcttttagtacagattttagaaccatgccctcaacttacatctatactccctttgagtgcttcattaatatcagtatcacttcaaaaacctctactgtcatgtatatctaaggccggcgtggaacaggataaattattgaatagcacacttagtgaaaatggacaattattatcaaatatatttatagatgaattcaatggggaagaatatacatttaatatgaatgaacaaactcctcttttaaataacaaagattctaataatattaatagtaataatcactataatgaccaaaataataacaaaaacagttccaagataaatgatttgaaaagagaaataagtttaattgatgaaaactataattctgattacataaatgcaaatgttaaccctgttgataatttggatattttatcactgacagttctgaaagagtggacacagagaagtacagaagataaaacaatatcaatgtggaaagtttatgagtttggaaaatacagactttatatgggtgaagtcaataaagattattcactattattatgtgcaaagaaggattatccttcagctattgcaattgcaagattaacaagaatgtgtgaaattctttccaaaagattatagacctgcttttatttgtattctataaaaatataaatatcatatatggtatacatgtctacaattcgttctcttctataaaaaaactacagagtacagtgactaatgaagtaaatactataaatttgaaaacatcttggcatgcactataataagacgaaataattaattgttttgcaaattctggtgctttgttaaatgcataagttgtatctaacaatgctttttcaattatcttttgaataacgtcttcattctttccaatatctttgaaattactcactaagttctttcttaaggatgattgcaatatagcacttgcaactgaaacacctaatgttgaacctgttgatctaaacccatattgtattgaagtaaccagcccatgttcagaatgattcactgaagatatcatagcaattaatataatggtgataattgatgtcattccgaattgacctggaattagtatcaatgaattagcgtaaaatgacttttccttatctgaagataaaaatatcaggaaacttcctatactgttaacaaatgtagaaatgagcaataattttttgtattttttatattctttaatgtacaaacctgcacctatagatccaataattgcaaaagtggagcctgggatcaatctcacacctgattcataacttgataaattaagaacagactcccaaaaaaatggaacataaagcaagatacagtaagtattcatagataaaacccaacatccaagtgagctccaaaaaatagtcttattttttaaaagcttgacaggtataacagggtttgaaattcctttttcaaagtaataaaaatgtatcaaaccgatcaaaccagctccaacaataacaataaattgtatactttggaatggaatattctttccaccaattgatgctgcaaacattaaaataaaaattgaagaaactaaaactgttgatccataaaaatcaactttcccaaccttagatttgagactttcttcaacagtttcagcttcctcttccttttcaacattcaaatataagaaagttaaaataccagagattaaacatattggtacttgaacgataaaagccaatctccaattaaaatatttttgaaaaaatcctgcaaagacaccacccatggcacttccaattccaaaaaagatattcacatatccctgatacaatccacgttgatttaatggaacaagatcagataaaacaattgcactcatggtattgaatcctccaccaccaataccacttatagcacgccctataacaagaacaatgaatgaatttccaataccacataataaacatcctaatgaaaatataactgaacaaaaaacacatacactttttctaccaaaaatatcagagaatttaccgaaaaccggttgaaaagctgcacataataaaagatacgatgttgcaatccatgaaataacaggtaaacattgtaagtcatcagctataacgggtaacaaagtagctacaattgtagaatctaatgctgcaacaaaaacattaataaacatacaacataaaataatatagaatctcatgtctttcttaactggttctttagcatttctgaaatgagaagtgacatcattccattcttctgagtttcctgtataatcagctggcgatatagacgtatatagaggggtatcctcaaatatttgttctgtagtcatctattaatcaagttaccagaaaaaaagactgatctttataaaatatatatggtgttttatcactttaaaatcttaacttactttattacttcaacggttatcgacgagtttttgacattttctcttatcaatttcaaaaaaatatttttcaaatgcgaattctggagaagcttagcccggcatttaatttccggaatttttgtttgttgagcgcaaacaatctccgagataagtctgttatgatagacatctcccggataacatatccgagaattaaagtttgctaatttatttcctggtataaaagatttatctttccgttgtcatttttcctttcaagcttatctagtatactcagccaaccaagtaatatgactgttggtaacgttgattcaaaaaaattctgggaaattgcagattctaagctcggtttctttggtgcacaatttattagagaaatcattgtgaaatcagaaggtgtatatgtctacactaatgaaggtaaaaagattttggattttacatcaggtcaaatgtcttgtttagttggtcattgtcaccctgaaatcaataaagtcattgcagaaacctcttcaactttagatcatacactttcaggtatggttagtccacctgttattgaattagcagaaaaattaaccagtttattaccagatggattagatagagcaacatttttaagcactggtggtgaatctaatgaatatgcaattaaattagctaaatgtgtcacaggtaaatttgaagttgtcggtttatcactttcatggcatggtatgactgcagctgcgaatgcatgtacctatcaagctggcagaactggtcatggaccaatgacaccaggatctttagttttaccaagtccaaatgcttatagatcaatttttagacatgctgatggctcatatgactggaaaactgagcttgattatggttggtcgataatagatgctcaaagtacaggttcattagctgctgtcattattgaaccagttttatcttctggtggtatgcttatattacctgatggttatttgaaagcaatgaaagaacattgtcaaaagagaggtatgcttttaattgttgatgaagctcaaactggtgttggtagatgtggtagtatgttcgcatttgaaacaatggatgttgttccggatattttatgtttaagtaaaactttaggtaatggtttaccactttcagctgttgtcactagtaaagaaattgatgataaaggaagaggaggtggattccttttctatactacacatgtcaatgacccaattccagcagcagttggttcaaaggttttagaaatcgttgttcgtgataatttagttgctaattcaaaggctagaggtgaacagtttgcagctggtcttaaagaactttcaaactctttcaaagcaattggtgatatccgtcaaatgggtttgatgatcggtttagaaattgttactgacagagaatcaaagacaagtgatcctgaaaaagctaatttgttagcaaaatctatgatgaaaaatggtttaaatgctaatcttattgctgtcaaagctttcggtggtgttttcagaatggcgcctccaatttctattactgaatcggaaatcaatgaagctttagtaattattaaaaaagccttcgaggaagtttatttttaaattttatattatatttgtcttttatttataaaatcaataacaatttcgtattcttactctattttaattaatcagatatactcataatctaaggcatattgttatctactaattgagtttccggtggaaaagttttgaaatgtattgtgcttacgtaattgtttatttaatatccaggaaaattctcttatcattccaatcatattttggggtcagattattacgcctacaatgtaacttttgaattaaaagattatcactatgttaatttcacaaacggtttattagatgacaaaaacgacacaaactgttgacaaaatttcaaaaaaaagaaaacgtggtttagcatgtaaaaattgcagaaaaaggaaagtcaaatgtaatattaatgaaaaatatccatgtacatcttgtttaagttcaaatcaggaatgtattgagtcaacgatcgataagcggaaagaaagagctgaatcagagtatacacagcatcttgaaaatagattaagcgtttatcaggaagaaaatgccagaattgcatcacaattagaaaatattgttaaggttataagagaagtgatggatgttagtagttcttttgagtttaataaattgaaaaatgaaactacaaatacaggaattagctctccacaaactaattatattaataactacactaatattcaatatatccaggatgacattgagccaaatttagaagaagatgtagagtctagtgaaaatttgaatgaaaaatatccaaccccatccacatttaaagcgtttgacaataaacctttatctgtttatggagcaacaagtgtttttgataatatatctgtctcaaagctgaaaaatcttaaagaaatggaagagatttatattttgaatagagatcctaaaattaatttttacatcaaattgttctttcaatggcaataccctgatatacatatctttgtttttagagaggcatttttattagattttttacatgctaagaacaacagctcatattgttcaacggaattaattttttccatttgtgcatttggttgtttgttatcagaagatgaagataaaaagcagatttcaaataacttctacgaaaaagcaaaacaactctgttttaataattattctaaaccttcaatttcactcttacaaagttttttattgcttggattatatgatatttataatggtaaaaatgatagtggttggatattgagtgggatgggtatgagaatgggttattctatagggttacaactcaattccagagaagatattgataatttaaaatcagaattaggtacaaagattaggagtcgtatattttgggggacatatttagtggatcatttaattggtttattattaggaagaccaccgtccttgaaaatgaatgacagcactattgaagaaacgattgaactaccagatattgattggattcatgaatatacatgccccggtgagctaggtgaagctactaaaattttattaattggaaacccactttgtgaaatggttaaattaatgaatatttcaggtgatatgataaatgatatttttgatgatcaaaaatatagcaagcaaaatgacagtgtgatattttataggagattaccattggttcggaagtacaatttgagtatgtttaagtggagaaagacattaccagaatcacttctttggaatagttcagatttgaaggaaattggtgctgatccaactactttaacttttaagttgatatactacatagtcatactttgtttgaatagaccatttttaaattcaaaagttaatgaacagtacgtcgagtattgtgcaaattgcagaaagatttgcttaaatgctgttaatgatcttactattgcattaagtagatttaccacaatatacggtttcgataaatgttcaaacttgatcatatacagttgtatcatttcaatttcagttatcttgagatcatacaactcagacagtaaatcaaaattgatgagtgaccctgaagtgaaatttaaaatattacttttcatgaaaattcttagagagtgctcaagaaactggggtttaagtgaaaaggctttcaaattaaccaaagataaattacgtaaggaacataatatcaacattgaagaggagttgaacagttttgatcaaaatgaacaacctgatttatttacaagtgactatactgaagagttcataatcagtggccatgaatcagtagacggtgaaaaggattatagttgttcacctttagataaggaacaaatgctccaaagcaaggattcgttaggtggacccccaattttcatgttatctaacacatttagttttctagatgagttcctatctgatgacatgattgacccttttgattttgaagtttgaatcattaaatcatcatacgttttcaagggagataaaagtttcggataatgtccccgatatttattatcacgatagtaaaacttatcggagaaccaccccgttttattattgtgcgcgtacggagaaaaaatccgaaaatttagataacaatttaaagtttcaacgtttaaatatttttattttgataactttaagttttattcataaagataagaaagttattgtactagaacaaaaatctccgatatattttgtgattgtataaatacatcagctggatccagtaaattacagcatcgtcaacttgtgtaaattttttatatttataattatcaacaaacatgtcatcaatcaacacggatgaaaaagtcaatgtaaaaacaaatgttgaagaatttgacggagaaattcttttaggtactgtcatttcagcttctggcgaagaaacagaagttcatggtgatttaaaacatatggatgaagcgttaggatttgcacttcaaaatgatgatttccaatatactgaagaagaagatcgtaaagttttacgtaaacttgacttctacttgattccatttgtttcttttctttactctttattctacattgataaggccagtaatggttttgccgcagttatgggaattagaacagatatgaagatgaaaggtgatcaatatagttggaccacttccgctttctaccttggttacttggcattccaaccaattgcatcattatccttacaaaaatttccactatcaagtacattttcggtttatatgttttcatgggcaattattatttgcttacaagctacaaattctagttatccagcttttgtcttcttaagaacacttttaggttgttctgaagcttctgcgtctgttttcactacactattaacatctcaatatttcaaaaagaaggaagcatttttaagagtttcattttggcttgccactgctggttttggtgttttctttggtaatatgatggcttatggtattgcaataagatctgatcaattttcaattgaatcatggaaaattttattcattgttgttggtttaatttcatttgtcacagctattattttatattttcatgtttcaaatactccttctcaagcatggtttttaaatgaaagagaaagaagaattgttgttgaaagaattagagaaaattaccaaggatttggtaacaaagtttggaagaaacatcaattttttgaagctatgactgatataagaacttacttattttttatttatgcagttgcatttaatattccaaactctgcattatcttcatttggttccattttactacacactgatttaggttactcttctaccgatgcactactttatggttctccacaaggtgtagttgaatttattggtttaccaattcttgcttattgtatccaaagatttaacctaccaagattgttaacatgtgcaatcttgattacaatttgtatttgctttgcttgtttacttgcattcggtaaagactcacatactaaacttgctggttattatttgctaggtttaatgcaagttggtccaattggtagtttctcatattttgcttcaaacgttccaggttatactaaaaaagttactattacttcagtttacttagttggttactgtgttggttctttagtcggtccacaaacattccgtgcaaatgatgcgccacattacaaccctgcaaagatcactatcgtggcttgtcttgctgtttctgctgcttgttactacgctctttgggcaatttgttattatgataataaaaagagagatgctaagcaagcagaattgggtgataaatatgttgcaccaaaaaatattgaatttagtgatttgacatccaaagaaaatatttattttagattcactttataatctttttataatttttttataatctatttatcatttattttttaatcttttagttatattaatattagtaccatatgccaagaatagccttcaagataaacattttgtatttgtcatgacttgaagctctttttgtcattggtgttttgaggatagttagagtgactgataaatttgtcaatttcatctttattagtaggtgagataggctcggttaaagaaatccgaaaaacaagttagatcggagttcaaaatccgcaaaaaatttccacttatcagcaaagttttcaaaatattcaacttacttaagtcggagttttccacttccaactcttttccttaatattcattgaattttaattaatcataaatatatccaaatattattgaaatgaaaatcagcaagttggctatatactttttttgttttgttttacaaggcatttttgctctaggcttgtggggattgaagatgttaccttagtaccaaattttgtcccttcaattgaatcagtggtattcacaaactgacaacactccagagagatggaatgtggttgaattacttaaaaaaatggcaaaaattgaatcaccagttgggtatgaatataatgtaatgaattggttagcaaaaatattaagagaacaggggttaactgttgaaatgcaacttgttgaagacagtcaaaccagtaataccggtgaagatagatataatgtttatgcatatatgggaacagaaagggatacaaaaattgttgtttcatcacatattgacactaatcctgaaggtcatattccatataaggagattggagaagagattcatgttagaggagcatgtgatgctaaaggtgcagcagctggacaaattgttgcattttttgaattatgggattctggtaagatcaaagaaggtgatgtttctttattgtttgttattggtgaagaatataatggtattggtatggaagttgcagttaaattattaaatgctacatggagtaaagctgcgattcttggtgagccaactgaaaacaaattaagtagaggtcataaaggtaattttaggtttgatgttgaagcatggggtaaaaaaagtcattcaggttatccagagttaggttttagtgccattgaatttttagttaggaagctgtatactcttttggaagaagaaatgccatattctgatttactagggccaacaactgttaatattggaactatccaaggtggtgatgcggcaaatattgttccagatcatgttaaatccgaactttatattcgtatggcagcagaacctgaatggatcaaacaatatgctaaagaattgtttaatactgaacattctaaacttagtgttgttcaatatcttgcaccacaatatctagactttgatgttccagatattgaactaatttcatgtgcttatgctactgatatgccatatttggaatttttaggaataaaaagatatctttatggaccaggtagtatttctgttgcacatacacaagaagaatttgttactgaaactgacttatatcaatcagtcattgattataaaaaaatcatcgagtataatatttagattttatttataaattataaaaaggaatcctaaaaagaaacaaaaaacaaggaagctaccaaaccaacggagtaaaattttatttttctatgtccgatatatcaaatatgagaaataaaaatagttaaaaatttgttcaaaagtaactgttttagtgttgtcatgatataatgtgtgtagtggtgaactttctataaaaagattgggaaattggacatcagataaaatggataataatgtgtacatagtatcgtactgtttagatagagcaaaataatataattatgaaaatttaaaattatagctcactgtcatcttcaaaatcatcttcttcatcaataccatcatcaacatcatcttcatcatcatcgtcatcatcatcataaaaatcatcttcccaccatccttcattttcttcaatattttcatcttttgtaggtttaagagactttgtaacatcgtctaaagttggtaacgttatatcagctggcatacgttccctactttttttcacgtcacttttaactttctctacataaatatccctttgctttttataacaaacacttgcctccacatttgccggactactaatatttggatcatctaaaagacttagtatacttaataaaacagattcaacattttgagcaggtgaccaagtaatatttaatggctcatcagttggttgttcattatcggcagtatgaaggatggaaatacataatcttccgtcactataaacatttggatgaaaaatagcaggagtaaatttgaatgaaggtggagtatatgggtaatttggtttaaattgtagttgagcagataaatatgcaccattatagatactttcaggatcaacgaccatcagagatacattccataagaagatgttttcatcggggatttctacatgcacttgttttaaaccagttttaggattagttatatctctaaactctttccaaaggatttttgctgcagacattagttgttttgttgtgtcagattaaataaatagaagattaagtgttgatattttgaggaggaaaggaggatctttgaaagtatcagattcgagttgcggaaaaaaagaaataataaaactgttactacgaatgaataactgtggtagaatcgatatttatcactatacactttgttacgtaagaatgttataggttacattacagctggatgtagagatattacaaggttgtcatgatatataagtgaaagtaggtagaccataacatcgtataacaaatcattaatatcaatagtttttgaaactttcattataaactttataaagtgaagtctatcaatcagcaattatacatattatttacaagaactggatacatggtatatttatatatcattcttcagtagtaagaacagcctctataacttcttgtttgttattttcaaatttttccttatcttcatcatctttttctttatcttcttctttcttcttatcctctggggttatacctaattgacgtgcacgttcttctaatctcaaacgtttatcaatcttagcttgtcttattcttgccaattcagcttgaatttcatgtggttctttaggaatcttattaagagtatcaggatcaggccaataacctggaacattaaattttcgatcagtatcaataccaacatagtacatgatagtaattggagtcattaaatagaaagtgaattttgctaattcaaattgtgaacgagtaagtttcggtagacgtttccagaacatgttttgttgttgtgtgtaagtgaatagcgtgtattctttatcagagaaatcaaataagaataaaccatccttaggagctactaaagacatcaatcatgcactgcttgaaaagaaaccctcttgaaaaagagagaaatttcaggcggcgcggctgcccagtaggttgtgggaaaaaaaatatttttctttttttcactgcaggaattattgattagcaaaaagttgattattagtggttggtgaagttgtcaatggaaggatgtttgtctgtttgtttgaatagttatttaaatagaaatatttactgaaacaaagatgtctaaagttttgcaaatctgtacacattccggctcttttcatgctgatgaagctttggctgtctatcttttaagacttttaccacaatatcgttatgctaatttagtacgttcaagaaatccagctgattgggaagcttcagatgtcgttgttgatgtcagtggtaaatatgacggtgtcaaatattttgatcaccatcaaagagaattctctgattgttttaatgaaaaataccatactaaattatcatctgctggtttagtttataaacatttcggtcgtgaaattatttcaactgttatttcacttaatgaaaatgttgaagctgaaaaaaataagattgattatttatttgataaaatttactctgattttattgaagctgttgatgcaaatgataatggtattgatatgtatgaaaataaagattcgttaactccacgttttagagatcgtaatttcacaattgcaggtattgtttcaaatttaaatccaagttgggaaactgatgcaactgatcatgattttgatagacaatttgaaattgcatctaaaattattggtgatgcattctttaattatcttacatatatgggtaattcattcttaaaggctaaacaatatgttgttgatgcttttactactagatttgaagttgatccatcaggtaaaatcttattattcgatagatttgttccatggaaggaacatttatttaatgttgaaaaggaaaataatgcagttggtgaaccattatatgtgcttttccctgatagtgctggtacatggagaattgcagctgttccactttcatctactagttttgattcacgtaaaaaacttccagaagcatggagaggtcttcgtgatgatgtattaagtaaggaaactggtgttgaaggttgtgttttcattcatgctgcaggtttcattggtggtgctaaaactaaagatgcagttattgcacttgctaaaatggcattataaataatataataaccatttcaataaactaaatagaatgtttactatttatcatatctaatacatgtatattatatctattgtattttgtatgttatccatcaacatataaccatcaacataagtaatatatgtccgacagtaactttgaagctttaccggcaagtctcgcatttataggacaatagtggggggctcattggggggttgagaagtgttgagatttttatcaatttatttgtcccttattttattttggctatattgtgaacgttgagtttttgtttaccagatttcggtgatccttttttcggttgtttagaaaagaaaggagaatctaattgaactctctgcttaaccaaactagtatctttatttgtcatgaagaaatttatgaagcttagggataaagacaagaataaacacaaggatgatcgtctatccagtggacgtaaacatcatgcccttagtattacagctctggaacaagttcatcaagctcaattggcgcgtgcacaacagcaacagccgcaacaacaacagcaacaacaacaacaacaaggtagtaccacacctacaacaaggataaaacatcgtgcttcaactaatagtttacatacacctacacaatcaacatttgaaatcaataaatctccactatccgttaatttttctgaaacttcatcacaaaattttgacaatttaacaggaattgaatcttcccataatgatattattaatttgaaaatgttaccatctccaaaactttttagtaatcccacttttaatgaaggtaaaagtactttatcggcatcttcatccattcatgaatctatgtccgttttcccgacaactggcaatcatttccatcaaatagaaaatgattttgaatctgagtatttggattataatcaagactccacgtttgttaatttaaccaatagtgatagtcttaatgatattactgccggtgatagtttattgcaaacaaaacaagatgcagtgcaacatgatgttgaaattgaaaatgaaatagttactgaaaatttgatttcaaattcagttagagaagaagcagaaaatgttgtagctgcaaaaagtcgtaggaattcccaaatttcaacattttcaacttcaacgcatatttcaaacatacaggaaactaataaaaagttaacacaatcattgaaacattatccatccactatttcattgtcatcctcttgtcatccacataatcacgcgcgtggtaataacattaaacataatcctgcatctcttcaatcattagtaaaatctgattgggatgattcaacttttaaaactgcctgggtcaatagaatatctgaaaattatgatcctcgtttatattggattgaactaaaaggctcatcattattagttcataaagttcccactgatttacaatttgctaaaagtttaattgttgatgaagaaaaatatgaagatcaatctttcgtttcaatttcagataaaacaatgacttcatacttacataataataatgctgataaaagcacgactgatttatcaattaatactaaagctgatgatagttttgattcaatttcaacaccaattcctactccaacaaaattaactttttcacatctgcaaaatgaaaattctattacttcagaagacatacaaagtataactacagaaaacaataaattgggcgatgttgatgaatcttcaattttagatgaggacttccttcattcaagtgatgagacaagaaaagatgatactgcaattgaacataccattaattttgcagatttaattcaagattacgaatcttctaggaacatttgtaaagaaatcaaggatttaaattgccgaaatatcaaagaatcgcctcaatttggggacagctttttgaacactggcaagaaagtacctttcattattcatgaattatcgtacgaatctccatcatgtccacatccaaaactggtacttgatcctagtacattatctatattaagaggttctttggaatctttatgtcataccattatattttttccatctgataagacatctgatgaattgattgaaatactaccacttctttcgagtttaattgattcattcgtgtattttcaaaagtattttgatcttttcacgaataaaaattatctcaccatgaaaaaaattaggataactgatatggaaatgaaaatgttattttcaagattgagaagagttattgaattatcaatagttaaatttaagggtagtcttttagatgatgaaatattcaaattaattaaaaatctcacaaaatctttaataggtaattgtaacgataacttaaacgtcgaagaattgaaatgcattttgaatgaacttgatcaagtcagattatctttaataaatttagtcagttaccaattagatgcaagcaaatccaatattaattcacttcttttattggatattaataaatctgaattaatctcagctaaagattttattatgttaccaactgatgtattagctcatgaaatacattcaatagacttaacatttatgaaaaactggccattaagatcagattattcaacaatattatcacgtttagaaactattggttcatcttataactattggaaattcaacccattgcagtttgtacctgcggtaaatacacattatttaggtaggttattagcatatcatatttttgaggatccagaaacatcaattagtccagaaaaacgttcacaaatattaatgaaatggatacatttaggaattgtattgagtgatcgaggtgatatggtttcatggttaggaattgctacagttatttgttctcagcctgttttaagattaagagaaacatggagtcatattgatcttaattatttgcaaataataaggaaaaaatgggcttctgttgtttttgaggtacgcaaagctgagatatttggtactcaatattttgatataaaatcaaagcataattttaatgaaaatgaagtcacaattgcaggtaatgatataatggaaacttttgaaacagaatctggtgaacaggatattaaagttatagtaaccaataaaattggtgaacgttattcaaagaaagatgcagttccttactatggtgaattatttacagttaatatggataaaatcaaagattacgcacgtcagtatactggatttgaaacatttgatgatattgaatctgatgactacatgaaaacaaactttgttaaagaatacatttcttatatggactcattaaaatggaactttaatcaatgggacgtttattataataatattgttgatgggagtggtgttaaatctcaattttctggaaacaaaaatgatgagggcattgaagaagaaaaagaagatagtaaatcatctgtgttgaaaatattacaaactgcaatagcatttaattcaaataatggaccatttccaatcaatcattttatgagtatgtcggttgttgttgagcctcctcatagtagtattttggcaaacagtgatggtagttttagaagtcctttatttttaggttcatatgcatcaatattattcccccgattactatcacaatatgaaacttatgatcatgatgaattgttaggtgctcttggagggactgatttaatttccgaggaatcctcaaataaaaggcttaagaaaagaaatgtctatctgaaaaatattagagatatgtttgtgaataatagcaatggtgatgaatttaaaactgtggacaataccttattttttgaatctttgaatgcaattccgggaacatctgataaaaagaggaataaattatcttcaaaactattatttgaagatcctttgataccaaattcaaggcatctgagcacagtttctactggaagtttcaatcttgatgattacatggatatttataaatcataccttggagaattggttgaaatcttaggctcagagtctaaaattaatgaatctgaactaactcgttattttcacgaagatggtgctaataatgtttctattgtaccttctgctgctacaactgatagattggttgatattttggttttatcgggatccatttttgggatgtgtttgaatgaacaagatattaaatcgtattgtgctaaaaataatattgacgaagaaaacttgtcattcaagttatatgactcaagcttttcatatacatttttctcaacatatagagtgttttttactacgaaacaattactcgaagctttacgtaaaagatttgatggtgctaaaagtgcagctttatccattcaggaatttgtcaaaagaggtagaagagcagtaattgatgatatttttccaaaatgggatggtaaaggtttagatgaccccgaaatttggaaaaccattaattggaaattggttttgcaaattcaattaggtgttttggaagctgtttctgtgctagttgataaacatttcaagcatttcatcgatgatttagaaaccaagcataccctttatacatttttagaactacttgattgtacaatgttgaatgagtggccgaaagttttaaaatttttaaaaaatagtatacaatctgatgaatataatgttatacttgatgagtacaaattaattcaaaataattacagacatgtaagaaatatttgtattagaaagtcatatactccagaatgcgaacccgctgaattaagcttctcaaatgaactgaaatctattcctgatgaaaactgtttgccaacagttgatgacattaatcaaattgatcaatatgttacacaattgaatgaaacaattgaatcatccatgaaggcaattagatacgaagactggttagaaacgtttgaagtgtttcaatctttagttaatagttccccattagcaatgtttaattacaattatcaatcatctacaactcactatgatttaattaaaattggtgatatttttcaatggttgacgactgtaaaatctggtgataaatgtgacaaggatgtgtatttacttgataagttgccacctactgttagatcaatttttaaattatattcaagattacaaaatattatcttagctgaattagttgatgtatctcttactcttgatgagaggattgggaaaatgggtgctgctttaagaattattcaaatttgcagattaagaatgaaaaatgttaaattgtctaatcatgaaaacaatgctgatattccaagttatattgaatctatttttgtcaatacaattttattgccacagtcgagatttttctcatttgcttggcaatctgctgtggaagttattagtgatggtaaatatgatataaaaatgtttgatcaattggacactatattgtcattattgaacgtaccagatgagtttgaaatattagaaaatgtctcattatctatttgtcctggttgggttgcaaaaagattgttggaagttgcatgttttattccaagtatggatataaacaatacaaagctggtaaattttgaaaagagtagatgtatccataactgtatcatgaagattgttgaattacaaaagcaaacgattttatccaaaatatccccatatttgtcaacgttttcatttatttttgaatatcaagataagatcccatcattaaaagaaagttatgaattatcattaaaggaaaaaagtgaaaacggtttaaatactgtatcaatttttggcaaacacatagaagatcagatcaagttgattaagttggaacagagtaaacgtgatttgctattaagacaacatgggcaaacaccaatgaattctgttaatagatcaagtatgtattctaaggatcacattaatcgtgatgaaagttcaagtatttttaccaacactacctctagttttactgatattaaatcactgatggatgatactgctgataactctatttatgacatgagcactttatcaactgccgttgattcgtcaatagctgatccaaatcaatcagtacaaagtattaaatctacgaaatcttctagaactccaacaagtgtgaattcacaaccattatcttcaaatactaaactaacaacagcttcacgttctcgtggatcttcttctaaaagttctgtcatgagtcacggttcctaataaatttaaatttccatttttcaaatcaagaccattttcattgaatataaatacatttaatcaaccaaatgttgaaaaaagaagtgttaaaataagtgagttaccagattccaactccatgatttctaaaagtaaaccttatgtaagtttacatttgaaagatgctacaattttcccaacttatcgtacaccttatagtttcacaattgatattgggggtcaaaatcatgaacacacattccaagtagtaaactctgatgaagtaagtgaatggttatacaagttaacatattgtaagaaacattggttcttttcaaaatccgttaacaagcctacgttgaaaaatgcaagtaaaatgacatttggagttccattatcatttatttgtaaaagagattcatcacctgttccaattattattgaaaaaattcttactgaaattgaattacgtggattagaagaacctggtatatatagaaagagtgcatcattaactacgattcaacaaattaaatctgaaattgataaaactggagattttaacatggaaaatacattagtatttaatattcataacttaactggttgtattaagacatacctaagagaactacctgatccaattattccagatatgttacattgatgaattatcaaaagtttctgagattgcacaatctgatgcaagatttgaattatacaagagagttttgagtaacatgcctattttgaatcaaaatttgattgaaagattatcaaggcatatgaaattgattgaagaattcaaggcacataacagaatgactagttataatttagcaactattatgggtggttctttcgtagaaggatgtaaacctgacactatgaaaaaatcttttggtatgattaattttatttgtgaagattggattttacactatgatagagttttccagtgatttaatctttcactcttttgctggattttacttttattttatagaattatttagatattaaattgtatacattcgttttttattacgaatcatgaacatgattacataatacagattttgaagtcgcagataaccgaagatcaaccagttacagttgttgaatagataagaagtttttaaagttaaagttcagtttattaatttcatccctctacaaggaaaaatggtcaagattttagacgttgatacaagtaaactagcaaaacatgttgaatgtcagcgtgggtatgaaggatatgaaaaatatggagttgcaatgaatgttgatcatttaagaaactccgttaatattgatgacgcaaatcaaggttcagcaattaagttaaagcaagttgcaccatgtattaatgaatatagcaaggcaccatctggtcacaaagcaactactaattggaatattttcagatcttcggtaattgaatcaaaatggacaaatagtgaagatggaaatggtaaattttataatttaacagttttggagaaacatccatattctacacagacatttgttccaatgggtcgtttaagtgatgaggatgcatatattgttaatgttgcacctgataaggatggacaaccagattatgaaaaagttgaatcatatgttttcaagggtaatacagctgttacatataatgttaatacatggcatagtccaatggttgttttgggtaaaactacagatttttgtgttgtcacaaatgaaaatgatgtcgatgaagaaaactgtgttgaagtattttataatccaggaatcaaaattcatgttagaggattgtaaagtttggtatgtttttttaataatttttttccaattttttatttaatactatagattacacgtcaaaaatatactaatactaggataatatatatgataataatatatttatgtaaattatgcatcaacgtccattgcagctgaagtactttctgaagcttctgtaggttgatcattttgttcatcatcttcgtcatcatcttcgtcatcattatcagcacctgtacttctattatttgataaagtatctaataaagataaccattgctctacttcttcatcatcatatactgtaaatgcatcatctttgccaacaactgccactgttgtatttgcagaagttaactctttatcttgagctaaagtatctcttaaagctgtaagagcatattcaattaattgttcctttgaagcatctgggaattcttcaaatttacgttcaaagaaagttttagcagcttgagatctagcgccaattgcagttgcaacatattctaaagctgaacctgaaggtaaaaattcgaaaagatgaggacctgattcatcaaaacctgcaattaataaaccaacaccgtaaggtctaccaccagcggattgagtatttgtttgagccttatcagcaattgagttgactgccttttgaatattaaggggtctattgaaaaccatttgagatgacattgcttgttgacgtaaataatttgataaaattctagcatcaggagctaaacctgcaagagcaacacccatatgattatcaacacggataattttcttttgataagaacctaattcttctgcatttctcttgagagctgccaacacaacatgattcttacttacaagtccaacagcagctgaaccttgtttaattgcctccacagcatattcaatttgaaatatacgaccagttggagaaaatgtagtagcgtcgttatcgtagttatttctaaacattaattaatactgtgttgtcttctgaatatatcgtttaccaattaagatcaatctattcttctgagggcaaaccttcaatctgcacaattcagtttccttcttgtgaaagtgaaataattatcaaaattgcgagaagtcgttaaatttgcgagaagaaaaaaaaagttccttaaattccgaggtgtttacgtaatcccctagtaaaatgaaatggcatcaatttaacatcattactagtattaaatttatgaaacatggctctatctcaattttgataaaacaatttgaggctgtctcctgtaaagatagttctattatatatacatatagtatacaatcatatacatcaatggcactgcgttttagtccacttacacgaatcatagcacttagtggccttcttgcactgggattccttctagtggcattggccactgctctatattcatcttggttaccaatttttgatgcattaatatttgccgttgctcatattccagttttacttacgcaatcttatgattcatcatcacttgatttagattcatttgatggtacttttaatgattcacctgcatcagatttgggtaaatggatatcaagtttcctattaacagctgctgttgtatggccaattacactttcacgtaatgcaattctatcatctacagcttcaacgataactattgttggtggtatactaattcatactacaattgtattatttacaacatttttcaacactttaacggataatgatgatcctttctctatgtaacattttttatatttcatattttcaataaaaataaaaatacagtaataaatctcttatcgataaatatgtagtaatttttcatgataactgttgagatatatggttatgagattaagtaatcataaacatttcgtcgaagattttatcgacgacaaataaatttatctatcttgaaatatgaaacatatttggaatgtataacttagttactcttgttcttcttagaagaatactcaagcttatatataatatttatatattaaaacgctaactaaagatctacgtaatctattaactatcatcaaagatgtcattcaatcaagtcaactattccagtaagaatatagataaaaccgctgagatgatatctcaaatggttatctcaggtgaacttaaatcggacggtaccaaaggtaacgttactgatatcgtaaagaaagttatggcatccaatttaaggaacgaaggtattaataacagatatggttctcaccaaattcagtcaaaagagaacctcactgccctcgcatccgaataataaccggtatttctcgaaattacatatcagatttcagtattaattcaaattaatttttttcttgatttttattcttgtttttttgaattggtaattggcaatgtctaagaagaaggtgattataaatgataaatcatttgttggtttaggaaaacgttcaaaatcaggttgtttaacttgtcggaagagaaagaaaaaatgtgatgaagttcatccaatttgcggattatgcaaacaacgtaattctgaatgcatttggagagatgtaactataaataacaagaatcaacgttttgattttaattcaatggttgaatcacaaaaattgataaaatcacaatcgaaaaagcaaattatatatgaaaattcctcatcgattaaaaaaccacaacatagtaacaaaattaagcaagttccccagaattctacatcccagaatactgaattatacaatttaacaaaagattggagcaaatgtcaacacgaactattttctcctaaaaactatttaaatagtcctgattttagtcgtgcagttgacgagcttatgggtaacgattcaatgtttgaaggtttcattgataatattgtcgatcatatacaatcacctcaatttaatccagattttagtttattagactcttcaattcaatcaagtttagcatatgcaactgatcttgttaataaaacccggcgaaattcaacccaagatattgattctaacagtaaagataatattaatcaacctccattttcacctttaaggcattttatgaattttaatgaaatagagaataatacacctgatgagaataatggtttacaaaataatggtaaaatcattgaaattaataaatctacggaatcaactgaaataagtctcaaaaaagagatttttgataataataataacaatggtgtgaatccaaaagataacgaggaagatgaatctgatgatgatgatttggaaaatgataaatatccaccaatggatgaatctcaaatacttgaaaatgcctatgtttcagatgctgaacttataaaaatatttaaatccaaaaaattccattcataccttaagcctacagttcatttactattaaacaaaaataattcactaaatatcataaatccatcatcaactattatgagacagttggatggtactgggaaattatttcttgaacattatgttacaaatttagcaatgaatcaattagatataggtaataaacaattctttcttgattatgcattaagtgttgcatcaactgataaagccatattatattgtttagtagcttggggtgggatgtttttagttggtagaaataatgaagatgctaataaatattttgaaaatagttataagctgatacagaatcgtcgaaactcaaataaaatagaagatatcactgatgatgatagtaacaaaagcaactccaaaagattttcaataacacagaatgattacaacaattctttttcaaaaaatgacgtttccacaaacttaattctacgaacgaaaaagttatcaaatgatgaaaatattaaatgtttattattttacatattattactatgtgctgaaatatcaactggtgatgtatcaagatggtatcaaatgttattacaatgtaaagatatacttggcaattatggtagtttaggggagtttattaaaattaatcaaaatagtaaagttgccaaatggattatcagcaatattttctatcatgatgttttatcaactaaaacattagattatggtacattattctcatttgatgaatatacatatgttttccaaacacaaaagatttttgaaaatggtgattatggattggatccattttatggattatcgcaggatttatatttattattagcaaatgttgcaaatcatagaaagactatcaaaaatatgaaattcccattaagttttattccaacaagtggactatcaagtgtaccagatgaaaaatattctaaagagactattaaatcatggtttgaaatttttgatagtcaaatattgaattgtaaaccacctaaaaaaatgtttgagttgttattaaatttggattcaacggggaaattacttgagtatcatttaacttggtttgaactaacacaaatatgtcttagaatttatattagaataaatttcaaagagatggaatttgataatgtggaaatccaaaacttgagaagtaaagcagttaaacttttcaatatattaattggtactaaattacaaacattattaggattatcattgttaatgattggtgttacttcagttacagttcaagatcgagtcagattaaaatcaatttatgaaaaattcttatgtacttttcaaattgttaatgttcaagtttgctgggaaattattcaacaggtctggaataaatatgataatgaagtttattatggaaaagaacattatgttgattggcctgaagtggttaatgcaatgggctggtactgttgctttacttaattaatccaattttttcactttattttttattgtgtatatacaacgttatatatattatgatcgatttaatatattcttcttaactcattcttgagcaccacctttatacatttcctttgttcctctcattaactcatgaagttgaataatttgatcatctgacattttttcaagcatatcatcctcaagatgatatttcttccaatcttgttcagtattttgtaaaaccatttcaagatatttttgccatgaacttaaaaatccaataatttgtaatggattatcaattttttgatgagctctaaattcagctttgacatacatatcacccagactacgttgatcaaatggtaatttacggtgagctcttaaaatttctctgtataatgatagtggtggtaataatggattttttactttttttggttccttcatggtaaccttgaatgggagtttagatgcattattccttaaacattgtattattctcatgacttgagttttccgttatctatataagagagccttgtagagatcttgattagaaattgagacaagttcaccatgttttttctccatgctcataaatcgtgaaatcaaattccgcgtttcaccgtcaaaggatccgacattgacaattataatgttgacgagcctcctatccttgatataatatacagtttggcagtgaataacagtttcattttttttcggaacagaaaaaacatatctgccaaaagtatttgaaaatattttggaaaagaaattgacatcaaaaggataaatgttgaattacgggtgtggagcgccttagtgcatatcacgacaaaaaaattgttgtggtttaccttgctttataagttgttttggtaattaagtttatgaaactaaatatatcaagttaaaactactaatatagtcgtattaactcctctttcataagttaaatagtttaatgttgcaaaaaaatatgtttttttcttttcaagattaaaagaaaatgattaaccaacaatttgcctggaaaattgaaaaatattttctgacagtaaattaaaaattaatgaaaaaaacatatttttattaaaaaagctgaattatataggtaccataaggtatataaggtatagaaatgacaaacaaagtaaagaaaccatagaaaacacaaaatctgagtagtactgttttagcatgggagaattttcgtattccgaatctgaatcaaacttacgatcttgtttttccagactgctttgatgttggtaatacccagataaatttcttttctttctatttgttcccttagattttgaaaatatttttttgatcataaaaatggcagctaatattatcatggatgataataagaaccatgtaaatctatccatctttgacatcttattctccgcataggtcaagacttttacagttgaggacttgacactaaattcattttctgatatcgaatttatatcaacaagtttataattgaaggttcctaaaccttttttttcaactggctcaaaaatatttgattcctctggaagtaccagttctatatttttagtgtttctatactgatgttctatcagtaaaaccggatcattctgtgcctgtggtaccgtcattgaccgatgatagtgttgataaggataatcaataccgaagagaaaagataacagatttgatggatatattcatcacaaagagtcaatgtgcataattaaaaaaagtatagcgattaaaactcgcttgaaaaacatcaaagcaaatctatcaaaagaaacgttttttcgttaatgaaggaaccttttattattaaggttttatcttcaatttttaccttttcaaactttctttcatgatgaaaatagttttgtgtgtatttctaattaaagtgttctatgtttagatatttcactcttcaatttgtaagatcacatatacatagtttctatcgttcatggataagttccacaattaggacgctataatacaccccgcgtggccagaacaatttaattgataacaaatcagaatactatagtattcaaattacgtaactaaattgtatattatgattgttgattgatatataataataatatttattctataacggttaactgaaactatacattgaatataaacaaatggattttatatatatatgaatgatggtaacagtcaagcaaagatgacaaaacaaggttgattaactgtaattttttttaaaattttaaaattgaaaattgaataaaactgaattattgaataatgaaattgactcaattattgttgagcacattgaacacctggttgtccaccttcatcatcttcatcttcataatcatcataatatccaccacgttggttagatgatctagattgatgttttattggatcaaagtcttccaatgtacatgaatcatcaacttcaacaccctttggaatcttaacttcttttctctttggtaagattttttctaaatcctttaatttttcttcagaagcaaaattgtttggagggaattcaacagtgaatttaacaattaaattaccgtaaccaccatgttttggaattggcatacctttacctgaaataactttagtagaatctggtgcaataacttcacctggtaaagtggttaattttaagaattcaccactaacatgtttgaatgcaatttcaccaccagctaatgcagttaaaagatcaactttttgttcaatatataaatcatcaccctttctagtgtaagcttcatgtttcttttcttcaacaacaaaaacaacatcacctggaataatatctggtccttgatcaccttcaccttggaaaacaactctttgaccggctttcatacctggataaatattaacttcaagaatttttctttcatttgcaatttttttaccattacatgctttacatttatcagcagctgagacaatatcaccttcaccatgacaagcatcacattgaatttgcattctttgaatcattggacccatttgtctagtaataaatttagtaccaagaccattacatgaagtacatttcttaacatttttaccacctttaccatcacaagatttacaaaggatagttttatttaatgcaagttttgaaactttacccttgtataattcttctaatgaaacacttatagtatgtttaatatctctacctctttgtggaccttgtggtctaccagaacctccaccaccaaagaattgagagaagatatcactggcatccataccacccataccacccataccaccattcatacccttttcaccatattgatcatataaatctctcttctctggatcactcaaaacttcataagctgcagtcatctccttgaatttttctgctgcttcaggtgatggattcttatctggatggtatttaagagcaccaagtctgtatgcttttttcagttgttgttcagttgcatcaggtttaactcctaatgcatcgtataatttagtatctgcaaccattttttttaattagaattatctatctattgatatgaaataaacgaaccggttcgtgtgattgacaactaaatttacaagctaaaaacaaggataaaacctttcaaagagttacagtaaataagattaaacgccaccactaccaacacttctcaacaattatataagtctaaataaaattttccaacttgcttgaaaatttcaattttcgagaaccttctatgcttccgaaaagggaaataattaactttaattttggctacatgaatcgcactttttcactgtttcgagtagttacccgtttgggcagttgtattttaattctgtctatatatattaatggtgaatgtagtatgttttagtgtctttaaataagattacttcgctacagagctgctcttggaggaggacgtggcggattattgctatagtttatccgttgaccattcgtagcattaccaggaggttgtgtttgttgtttattggacggattattatggttctgagaaaatgcatgatttccatacgtcgtttgtgtattcacctcttccagtggataaattccggcattgttatgaactccattctgtttttctcgcataataagcattttagtgacctcagtatgtataattgccgcatttcttgtagaacaaccatttaaccatgcaaataacgatccgataacaggaggaaatgtcaaaagtaagtcaaacagtatatttgcttgaagtttagcaaccgttttagcatctaaatgataaaacataccagctttagtagttagtctagcatgaattgcgtacattaaaaatggtcctataactggtaatgcaacaacaatcggacctaatccaattccacaatcaacaggataacaacccataaaacatttatcatcaacccaagcacgcttttgtacccatttccacatcttttgttcttccttagttgcactttctctgagttttagcttctttgttttaccttctggtgtttcatatctataaggatccttagtttttactttttcttcagcaaactcattccatttgtcaattgcagtgtcaatcgcaaaatctttggctattccgccaacaaaaccattaacgtagttcattataatgtcgttttgctcttgcagaaagaatatataggaggatgatttaaaaacattaaactaatttctgttaagcgatgcgagtttggcttagcatcaatttttgaacacctgcttaatcgatgacatcgaaggggctgtcttttcttttctgatatagcattttaatcaccatctaactatatatctacatatatatttacattttatatacaacaacaatagtttaatagaacactatgacgttcaaatttgaaaatttaccaagagattatgaacaattgcaagtaccggtgtatattttaaagggtcacagttcctcaaaaaaggacggagtcattggtgcttttagtgataaattctcagatcaattctatgaggttactgaaggctattttaaagcatacttagttttaagtcctggtgtgaacaaattcactttaaaacacctggatgggaaattccaacaaaatggttatgctgcatacaacacggatgctaaaccatacgatgaaataacaattacattaaattattcacctattccggatacttcattcactgttccaaaagttcatctctgtgtgctagttgctagagattctccggcattgtttgattgccctagcgataagttatacgagggaaataacttgaatacagctattaaaaagttacgtgttggtggaagattgatgcaagcatttacacaagatgaaatgagcaaaaataatgtcggtaaaagatgctttagatttgtagaagagaataccctttcaactatcagttttcaagaagaaatgaataaagttcaaagagatgaaattaaaattcacattattagaagtaagcatactgttgctgaaattagagatgctaattatgctcaacaaaatccaaatgcaaaagaagctggaaagttatttgattttgctttggaggcattgagagattatggtggagaattctcagatagtgcaacatcaaacacaccagcaattgcagcagttcaaattttagatgctcactgggataagtcagcaaatttgataagaggtcatgcagctttaggtggtggtacagatagaattaagttggcaattttcggttctcaaggtttacattcttggccaatgaattgggaatctgttcataaagcatttacagattgttcacccttgaacaccaacgaagttgccaatgattgtaatgaatgtagtcaatactgggaatgtttgtgtgtttctttaggtgcatttttacatgaaattggccatgcattgggctgtccacatcaagaacacggggttatgcttagagattataccacaatgaatagaaaatttttaacaaaagaaatgaagtgtattagaaccaaaagaaatgaatggggtcctgttttaagtaaagatgaacctggttggcatagacttgatataatgagattcctatttcatcctgcattctcattaccaggtgactttcaagatactacatttaaaccaatgtttagtttaaataaccaaggaatgaagttaccttctgaaatatcagcagaaccaacttttacagcaattgatgaagatacacttgatattatgtgcgagactggtatatacctggttgaatgtcatgtcggcgaatggtcaagattaagttatgaatatttaccacaagtactgaacggaccaggtccacaaaaatatattaggttgaaacacagtatagttcaacaacaacttgcctcacagtttaagaatcaaccagttcacttggaggtattatgtatgggattcggccaaagaagtattgatgatatgaaaaaatatttaattgaaaactctaaaacttttaagttgtcaaataatagaaatgcaaaaaagtccgatttatatggcttatcaaaatccaatccagttgaatgtatttttccaaataaaaaaattgtgtccttcagagttagccatggtatggcattggatggtattgaaacattctttgaagatggatcacatgttacatttggtaacgctaaatcacactattcagaattcaaacttgatagagatgaatttttaattggagttgcatttagatcaggtggatgggttgatagtgttcaatttatgaccaataaacgagtgagtaataattttggtgggaatggtggaagcatccataaaattctcttacctaaaggcagtgagctggtcggattttatggaagtttgggcagttggatagatcaagccggaattttctacacgtgaacgcatgaaatgtaatggtgaaagtgtaaattaaatagaacattagaagttatagaaatattatttagaattatatttaacgttatttaccgaaaactttttcaaaagcttgttcaaaatcagcaattaagtcatcaatgttttcaataccaacagagactcttaataaatcttttgtaacaccagcggcaactttttcttcatcagataattgttcatgggtagtagtccatgggttaataattaaagattttgcatcaccgacatttgctaagttagagaaaatctttaaattatcaacaaaacgtggaccagcttctttaaataaatcaccagttggattttcaacatccttaacaccgaatgaaagaacagcaccataaccgttaactaaatacttctttgcattttcatgataagcatgagattctaaacctggataagaaacccaagaaacatgttcattcttttctaaccattgtgctaatttaagtgcattagaaccatgtctttcacctcttaaagctaaagtttctaaaccttgtaataataagaaagaaccaaatggattttgacatggtcctaaatctcttaataattcaactctaacgtatgcaatatatgcaaaatctccaaacatatcatttaagattgcaccatggtaaccttcagatggtttagagaattgtgggaatttttctggccagtcagagaatttgaaaccattatccttagctggatccttgaaaatgacaacaccaccaatagtagtaccatgaccaccaatccatttagttgcagaatgtgtaacaacatcagcaccatgttctaatggtttacagaaataaccaccggcaccaaaagtgttatcaacgataacacaagcacccttggaatgtgcataatcagtaatttccttaaaatctggaatattatattttgggttaccgattgattcaagataaactgctttagttttatcactaattaaagatttaattgattcaacatcatcaccttcagcaaatttaacatcaataccgaataatttcttgaagtttttgaaagcattataagtaccaccataaaggtaggaagatgaaacgatttcatcacctgattgagctgcagctaagacagctaataattgagcagcttgaccggaagaagttgcaacagccattgaaccaccttctaaagcagcaattcttttttcaaagacatcgtgagttgggttcataattcttgagtagatgaaacctggttctcttaaaccgaataaatcagcaccatgttttgagtctttaaacaaatatgatgatgaagcataaatagggactgctcttgcgttattggccccttctggaacttcttgtcctgcttggacacaaattgtactaaaatctgtttgaaatatattaatgttagtattaaatttcaaagataaaagtggtgataacttttctccggtaccggtgaaatataagcattatctatgaactgtacataccggtcattatgatgattcttgtttaataaagctgaaattaaaaaatcatatacagtaagatcaaaattgaaattaaaaccgataaattaacgtctgaaagaatccagggaatattatctgattttatacttataggactaactatcttgtcgacagtttcctgttgaggtaacttattaaactgattatagagaggatgactccataatttttaaacaagaacgcattctccgtaactggtagagtcaatctgtgtataacaccgcaatttcacgtgacttaaaaaattgattacgtaatttttagtttcatgatttctcaaatttaatattataagttgcccttttgggagttacccaaacaggaaggtgtatattttattatgcagtgttacagaatgcatcaaatcacaaagatttaaaataaaaggcaaaagaattttaaagatgagtattatttgagctctcaaaatctttcagagaacaggtaaaaacttaaagataaatagtatggtttcaagtgcagcagtgacaacttccaataagtatttacaattagcaattgcagttattcttatcggtctttccgcaaaaaatctttccaatagatcatccttaggatctacagctgatgcattaagtgcatttaatgtcgcaaacaatgggacaagtttggacttagataattcttggaagattaatgcagctgctgtatcggctgctacattcagttttatttcatctttatttaattatatctttccttctgtaatcttcaaatattttatgccaaaaacggatcttatggattttaatattggctacacaacaaaaaagtatactgaaataccatttgaaacattatctcacagtttcttttccgtttcaaaagctcatacaagttacgtatcatcattattaagttcagaaacaattagtcatgctttttggtttgttaatatgattgttcaagttagtgattttgcatcatataaatgtggttcagttgatagtttattagatacttataatgttacaggtatatcaggcactgatatcacaaaaaatttctttaatatttttgataattcatcatcaactacttcaatctataatgatttataccaatctcttttaaactcaaacttgacacaaatatctaacttaacagatgtttcaattggtaacttgaatggaactcaactacaaaccaatcttttattagctttatcacaagattgtcaaattaagaaatcttcaatggcaatgacaattatttattgggtctcccatgttttatcttctggaatgttagtaagtgaaatgacttctttttacaataaatttttatctatcaaaatttcagctgaaaatttaagtcacaaaaatgaaaccactacacgtcaagctgaagaacaggatgcagaagaagaagccaccgaagagggggaggataattcagtagatgaaaatgaaaaagaaacaaatgattcttttagacaaaaagtgtacttggtttttgatcatcactggggtttatttaatgttatcatgaagaagaaacctacagctgaagcttaattttaatttatttttctaattatttaataaattagtttttgttcaattttgctcttttttttgttgatatttgcatatagatacttaatagcaaacttttttatattttataagtaatactaaagaattatttgattatacacagcaaagtttaataataattaaagtatgaaagtcggacagaaatggagggatagtacctctttataaaaaatgagcagaactgaaggtagcaaagaaaatttaaaagtttaaaagaaaatgtggataaatgaaataagataaataattgcagatggtgctacatttttgtaagccaatccactaaataattcaacagtttgagcggcaacaaaaccacatacgtcagatgtagtggatgttggaatcaccacatctggaattgccgaaacagtgacagtgtaagtatgagttaccgtagtagtagtagaataatacgtttctaatgctggggcagctggtgtttgtgaaataacagtaacataagtatctgggaaatatgtggatgtaatagtttgatatccggttgttaaagataagctttcagtaacatcactattgaaaacaattaaagttgaagttacaagctgctcatgatatttggtaatgtaactataacttaactgctctccagtattttcaattgtactaatgtaagtagaatactctgtagtttcataatcggaataaatgtcagcgttggttaaattatagtaaccaggtaccaaattggctcttgttaagtatgttgatattggggttgtaatagttgttcttatttgggacactactggaacgttaactgtaacagtttcaactgatgtaatagtttctgtgccagtgactattaaaagtaaggcggaactggtactgacaatataagttttggtggtgacatcaccaacaataattgtggtagtatatggttgaccagaaggtttcagtaatagtatttggattgttatcattagttggggaatttattggatttgcacttgtaataattaaagtgggtgttactggagcatctggattccatagagaaattgaagttgaagtcttggaagtaactaccggtggagctggtgccgctgttgtagtacctggattattttgtacaggttctgtagctgtattttctggagcaacaacggaggttgcaattgatggtgtaacagtggtaattgttgttggaccttgacttacagttccagcaagagatgcatcagttgtgattaaaatacaaccatcacagttgaaatcgggattccactatatgaaataaattatattcttgttagtatatgattcaatcaaaaaagagaagatttatagttgatggcaaattaaagactatgatttgaaataaaactgcatcaaataaaatggtagcactcttacccttgtatctgcagcagcaacaaaagatgttaagacacataatgcggtaaaaataggaaagcttcatcactgttatttactactctcttgaacaatacaaaagaaaagaagagaacataaagatgcactttcgaaaaacccatctgaaatccattaaatacacctcttctcctttgcaataaaggggcatttgttatattttgaaggctcatcacttttttctcaaactttttattttatttactttacttgatattatacacttaaattattctattgttcattttacatttttacgaatatccatctctatcagactgacaccttcgtcatgataaccacgtagaataccgtaactattatcagcttcataatcactgctatcataaccctcctcatcgtcatcatctgatgaaacataaaaatcactttcatcaaactccaatccacagtaaccacaaacaacttccattatatcattccaatctgctaaatctactatattcttgttataagtcttttgacgtgaatctaatccaacttctaattaaaatattggttaaattacagttaccaaccagctttttaatggaagtgtttgaaaccgcaattcaaaatcatatcgcttacatcaattgaatgttttgatttctcaacataatttgagattttatcttctatagtttcattcttaattttattattcaaactgtcattatctgaataccctatggtaccatacatttccaaaaattcacgatatttttccatagtatcgtttattatatctgtttgattttttccatttatgtttggcgtgtttgccaaatcattgatatttttcagatacgacttatcaatttcacaactatctataacattactttccattgataatgtagatgttgaacataataagagtaaaatatcaatgccaatcattaaaagacttttcaccatattttgaatagatattattgaactttttatgagtttagactgattaataagaattattgctttcaatggtttttgttgaaatatcaatgagttaattgtaccctcataaaatctcggacaaacgccagtcggaagtcttctatgtccatcttctccaacataacttttcagtgttccaagtgtttctaaatcagcattatcatcataggtataaacagcattcgctttttcattgtttctatgatattcatctaataaatcatcaaattcgttcactttaagtgtactagtaattaagggtggctctatattaagcttcaaatttgacaaagctgatctccacttcgattctaaacccttagaattaaaaattaatttataatgttcttttgaatttttacttttcttaatcaatatagatcccgcttcactggagtcaataaatgtagataagttgatactaaccaaaccaaacatataatcatcacatctgatatgcaataacatatgttggaacaagtaacaataattctccttgatagacgagcttgcgccatctttattaatagttaaaagattaatcttatcaaccattctgaacatacccagcgatttgatgaaatctggtgttaaactgaaccccatctcaccagtactttttataatatcatattctgataattcaactaaatcatctattattttttcttggaaattatcaaatgagaaatgattgtatgagttatgagactttgtatttgggttatgtgaagacgtaacaattgaagaagtacctaatgcaaatgatccccttgatggttttttgctgtgtgttttaggaaatgatatctttttagattgtgatgtaggatttcttatgggttttcaagttaggactcaatgaattattactattcaattcattattaattgttatgtgtttttcaacgggtacaataaagtcttcagcaggtagtgttgttttgttgcggcgagtaagagatcggagtatttaatgtatcaatgtatttggagttatcagaaaaagctgtagtagatggagatcccaaagataacagagatgaattaatagatttgaatggttttgtcatttgattagttattatgtgcgtgtaacaatctgttaaaacatcatcatgaacaggaatacattttgaattattatcacaaaaagaacacaaaggtaaaagttccataactttttgtttatcagtaatatgcaaacctgtaagtgaaaggtttaaatctatttccataagtaaacattcttcatggatcatatgttgacaactcaactcaattattctttctgtatcttgaacattatatgatacatccaaatctaggttacaaatgcaacatttcttttcttttactagtgatcttattttgactgtaggtgatgaggtgaatagaggtgttatcggtaattgataattcacttggctccttgttatagtaattattattttggtaacttatatcattgtttgaatcagtaatctccaatgttatcggtatgtttaaaagtcatttaaaatagggtgatgtctgtgttggaggaaactgtgtcattactgataatggtactgtgggctttcttggtttcctgcttgctgtgtttgaagtagttcctgaatttttgaaaagttttaattttttcttaaaactagcaatcttcttggtatattgttctgaagaacttggtacatttggaagcggtggtggagtcttaggaattttaagcgttttgggcgttttactgacattattagtcgttccctaggaaatgtctattaatatttggttcaagttgatcaatcatgtctttatccataaagctacccaagtgtagtcttgatggaatcggcttcttatcattttgccgattttgcatccttgattgtagtattgttcagatatgacgagcacagagggtatatgctaatgtctttccagtaaaagatcttaaacaaactgtaatattccataagaaaatgcacggaaattccagcccctggaaggtgtacctgaaacaaaacattacgtcagcgtgtttcactattagcatgtttttcttgagatgaaattatttgagaattacaatttttgaaattattaataaggcttttctttctttttttattcttgaattttgagatcagtgacacatataacaactcgataatatatgaaggtgtgaatgatatgggtttatgtagtaaatcttcaacaaaggcacctaaaactacaaataattcaacaactaaaagcaataatggtatatcatttggcgatgatccaagtgatgtctggaaagccacacgagcagcttgtacaatagcagtaatgaaggttttccaatcattcagtaacaaggaaacactcaaaaaggaaattattgaaacaaagacaattgaaaaacaggaggaacctagtgattttgctagaaagtacgagctaatgctttataaaaaacatagcaattcattgactaattataaattacgatttcgaaaagatttaactgctttaaaaagtagcaagacagaatttgccaaagatattttttttggtaatttgacaatggatgagtttgtagaatttgatgataaagaattgttatctataaaacagaagctgaaagataaggaattgttaaatgcagagctgaaaaattctttaggtcaacaattccccacaaacatcaatcaaattaaaaaccaaaatttaactctcccagatcaatggtgggcttcaggtagttctgcgaagcttgatacaaattttgatttagaataaaaagtttttataaacaactatatctgatataaattatacatatcacataaaatctaatcaatttcaatgatacttacttcctcagatgatgaatcaataacctcagccgactccatcaacctttcatctttttgttttttcaaatccttctgtggagacaaatgaccagactcatttagttctaacaaaggtaaatttgatgactttctaaaattccttgacacatgttgttcaatatcatgacttgtctctcttttgaatttgccaccactttcattattatcaacgaaaggagtatcgattatcaattttgctcgttttgtatcacgtaattcattcgtaaagatatcgtttttccttttcaaatataagttgtcattctcaaccgaacccgtgttttcttctaccttggaatcatctctagaaggtgtttttattggtgatccatttttggtaggagatattttgaaaaagttcgtgatgtgtgattgtttggttgctgaaccgaatgttttttcaaatttcgtttttgctgctgtttccttattagtatcacttgttatctcactctttctatcactattttcattttcaccctcccttttcaaaaattcaaccctttcagagtcatccttaatttcactattctgaacatattttggtgtatcagataaaatttcactattggaacgagttttaaaatcttcggatataagatcaagtgatgtcaatttactcggagatagaaatggattggaagattcattaggatgtaagacatctaattttgaatgcttatcaacagcagcatcgtaacttccagtttcaccacccaatggagtgacaccacggtcactttcagaagcacctgtctcaacatttttcctattaaaaagttcattaacaataggtgcattttgcccttccgaaggtatattgctgttttcagaattatttattgaaacttcaatgttagtttctacatcaggcgtagagattttggatactgtatttgaattatcaccagtagcattatgatgactactgatttgtgatttgacaatatctcttaattctttcaactcattttgtctcttttcctctagtaaaattgcttcttcatcagctttctttttggctttttccaaatcagtttcgtaaggatatagtcttgggatctgaaacttgtccaatatctcattaaacttagctaattcctctgtattcaatgatctatcatgagcagagattaatttttcaaattctttatcttccttattttccttagtctcttttgtcataacaccaatacttgaacgttcaatctcatcatcatcatacgtacctgataaattgtagttcaatgtttcacattggttagtatcatccttcaatttttcaacaattttggctgtatttaatacaattttacttgcatgtggaacaatatctcttctagcaattttcaccttttccttggtaggagttccattatttgcatcacgaagagataaatagttaataattaaacacttttcgtcaaatgttaatttggaaacatcagtttttgcactattaacatcatgaatattaactttgatttgttgactttcagtttttggttgctcaacaactgtatttaattgcgtattttggtcatcttcaactttattcggtatatctggagttgattgttttgatttggtttcataaaatatttttgaaagatgaagtaagtgtgagattgaaatattgttacctttatcagccataatggaatcaaataaatacggaataaacattttcatgtaaatactcaagaaacactcatcaatagcacccgtagctccaaaaccagtagccaattttctaaaaccttgcgtttcattcaaaaagtagaggtgaagtaatttttcatcatcatacttttcattatcgttaaattcatcatcaaacttagaagaataagtgataaaatcagaaaacttaataattgaaatcatatcatctaaaaatccgggttcaacagaaatactatttttaataagaacacatatacgtaacatcatattatcgaatgttttagttaaatttaccataattgaaccagcccttctcatctttttaactagtatgatgagggaatatagatcaccagactcataaagtaatttaaccaagaagttggtataaacagcattgtagataaaatgtttaccaggtctttcaatagcaggtttccaaatagtacttaattgtctggtacttggttttaggttgataatagataacatctcttcctttgcattctttatatcatggtcaaaatagtaataagattccgctaatctatacacaggacgatgttgccaatttttcttatcgtataaaattattttatgtaaaattttaaatgtcacgtctctaatagtagcagttttcaaaaattcttcatcaaggatgttttcaaataatgaattttgacaaagatagttataagcttccccttgtgttattttattcaatttcaaatatttcataacagctgaaaaaaggtaataatgtggttcaatgaaaggatcatccttattactttgttttaaagctagatcacacgatatgaccaaatatttgatgattccatgataatcttttgaatctttattatatttcaatttcatcattgccttggataagtacagataatcaaaccaatttggatttaagtcagtagcaagcttaaacgataattctaaaattttgaatactgcattacttggaattttattactcttcaacttcaaaaaggcaggcttaaaatcctcattcttatcagaatctataaatatatggaaagcatttttgttcatcggttccatccatgaattataaagttctttaccaaatgaattccaaagggtgggtaaaacttctttaacagattcctgctcatgaggttttaatctcatataaatcgatatcgcattaagataacatagcaatgctttcttctctgtcatagatgtagcttgttttctttccaaagaatttaatttatctgctgtccaaatcaaatcatcttcaacagtaaatgaataaacttgcccaagtgcaacccatgtctcaaatctattgcagccacaaagaatatcattctcaagaacttttataactttaaccaattcagtagccctactctgcattgtccttttacgaattctgaagaaatgaagcccaactaaaccttcaagatagtataagccatttttaccaatttcaactgatggttgtgaaggtgtcgtaaattctaattccattttaccattgaacacattagtgacaaaacttaatgaaatattttgatctgttaagtatgaatctaactttttcttatttcctatcacaactgcatcattttccaattcaccagcagcttctataacgctatcaattataagtttcatatcatttctaggaggtgaagaaactggatgtttcttattatcaaaacaaaatttaaaaacaaatctggaagtttgaattgcatcttcaagtgtcatcttttttggtttacatttatgatcaaatgtatcaaatctatcaagtgaaattgaaaaaccaaaacgacaatgtaacacctgaaagatatcattacaagaaaatattatatctattggagtcaatttataatgaatgaacttcaaaaaaattccattatcaatagatgaacataacttgttgattcccaattgtaagtgacaaacactgtaaaaatcagtaatagtagatggtaatgtgatattcaaggccataggataatatgctgccaaaagaaagaaacatgaaacataacattgattaaagacatcagttgtagcattattttgagttaaaatattatgacggacagttgatgaattattttttttataagaaaaataagcaataacgacgtagagtattctagatatggataccatcaacatttttgcctctttcttaacatctggagttgtttcatagtcattcttaaaacattcaaacctggtagcatcacagaattgaatgaatgttttggagaagtaagtgaaaaaacctattaaattcaataatctatattttgattcctcaaccgttaattctttcatcgattcatagtttaactcatgaattatcattttgacaacactttcaaatgcatatttgtaacccattatatcttcttttattttataaaatcttaatagtagggaccataaacgtaacttcatttctaaattagattgaaaaataaaggattcaagttgtaatctcaaatgttcattttccttttgtgttactggtttctggagtaaaacagattctaaaatttcattggctttttcattagaatcaaaaatcttcaagattctaatcttagaaagctgcgtttgaattgagtcatatgaaagaacagggatttcttcaaaatttgtatatggaatataatacttttctacttgaacgactgtagaaagttgttgaagaatatcagttagttttgatgtgtctatagattggattatttgtttgtaaaaagaataaatcaaaccacttaaatctaacccacagtttcagattgttaggtgattcattcttcgaatatatagtgaatgtagtatttatcaatttttgccattttttaattcttgtcacaaataagttctcggtatttaataaatcaacagaggttgccttactactattctttttaaccttaagctctttgacaaattctagatatgaagagactaatgtttcgtatattgatattgctatatttaattgttcttcaacattttttatgtcttcatcgtaaaggatggttttttcaagttttttataatatgaaatactcaatgaatcaactattgttttataattacttaaggacttttcagaaattttgttagccattatgattgagttaccaccttctcttaacttgagtaagtactctaaaacttttattctaagttgtgtaaaatgtatatcaggcggcagagactttagttcatcatacaaatctagataagttacagtttcaaaaagctcagttgatattattttagatgattttatattcaatatttctcgtacagtttcatcatctttacctttacttttcttcttcttatcagtgacaattaaagattgagaatattcaggataccagtttttcaaagatgactcaaataatgaaatattatactttaatatcatcatcttttattattgttggactttcaatagtttctgtaaatgaatcaattttatcttcaattccacatttcaataaataaaatggtagtgttttagtgacaaatacttcatgatcatctattataacagcatcattttgactatcagtaactggttcaggctccacttttacctctcaaacttcgggtgtttctagtttgtatagattttatatcaattacaccacatggaggtggtggttcatctttggcaggtaaaattggaggatcttgatcattttgtttatccatagatatatccggattaatatcaatagagtctggcaatgtattattggaatatatattaatgttttcactatcttcaatagtttcaactatagttgattgaagttggatattaattttatcaatcattgcatcagttaataaataagaatcataaattttatttttacctcttggctttggaacacagttaactatcgattcaagtaatgaagataataaaattgattgattagattcatcataatcaagatttaattcaatttcagaagtattatcacgttcctcaatccattgatcataagataaaattgtattccaattaactttagtagttttatttgattttaactttgtttcccatatttgattatttgaaagacattttttaactttattataaacaattgaatgtttatcctttatattatctaataattgaatatatttaactaaaatattatattgatttaacaataaagtacttgaatcatttaaatcaattttaagatcatcattaacattcaaattaatttttttatcattatcatcactaattttcatttcataacataatctagctaatctaaaatgtttgaaatgttcaaataatgttgctaataatttaatcattttattatcaggttcaccaaataatgttgcatttaataaatcattgattgatccaataatttcaccatatatactaattgtgcaatcatcatcagtaatattatttttatcttcaaataatgtaataatttcccaaattcttaacataccacgatttctgcaaagtaaatattttaatctattaattattgtattatttgacttcattttgtaaaatgagtatatccatattagccattgaatcataaactgaatgtgcttctctaaagtttttatctttttgaagttttaatgctttatttaattgattaacaattatctcaatttgtagttctcttgtatgttcctcaatatctgattcatcatcactcacattgagtgttgtaaaactcgactatagaatatatttaaatatgttagtaaatccatttcaaggggattattccattaattattctatacataccatgtttatgtggctgattgcagctgatgttcgttggttgttgtataaagtatacatctagatgatgatgtatttattcaatcgtgatctaagaatttctgagcgaagtgaaaatatacgattttttccagtacaaaaattgatatgataaattcttgttttgtttagtaaagtaagataataatacacagaattataaaactagacgagtgaaggtataagttgtttagtaggtaggttatttgtagcaaaaaatctaaaattgccaacaaataaataaattcgaaatttagaaaagtaattaattaaaagctctgaaatttaatttcatctttaagttttgataattcatcagtattttcttcatcaatatgttgtaaaatatttaaagccatttgatctgccagtaaatcattttgtcttacatctaaacttttatctaagtgatcaatctgattagatttagtaaagatagaagatactgaatcttgtaaaatattaatgtttttgtcatttgatggtaatgaaggataatctgcatcaataactttataatatttatttggtgatgtagatgcagaagctgatgatattgatgattgattaaatgatattggtgttcttatgcaagattctactgtaacaccagaatttgatgtatcaatattattattattattattattattattattattattattattattatttaaatcatttaaaattgcagaattggtaattattgacgataaattagtatttgaagactgtgaatgttgacgttgtgattgaaaagattttgattttgatctttcaataatttcaaaataattattatttaaactactattattggagtcgggtataattggagttagctgatcttcagtaaatggaggtattgaggtatcaatggggttttttggtaataaaatgatttcattttcaatttcattattttcaggtatattacttttagcaatggcattgctctcattaaaaatatcattattattactatgagagatagaatgattttcagtatcatgaaattgaatattatcatttatgatactaattttatcatgatttgaaacattatcatcattcaaatgcatatgagaggtatgaggtgtaatataggttgaatttgtatccatataatctaaagaatgttgacgaatacttcgacgtatactatttgaacgtcttttaccagtatataataaagttggagtattatcaataagttcagaattcatattaatatttgaatttgaatttgatactgaagtaccagttgatgagtttatattgatattagaacttgaatttgagttagaatttgaatggagaattggacttggtatggagtttaaatttatatttagattatgagatgaagaaaaattatttgcctgttgtatggatatatggttatgattattattatgattatgattattattattattattattattattattattattattattattattattaatgttattattattattattattcatgtgattattattattattattgttatatagtaaagcttttgagaataattgagagactgacctttgtattgatgaaagaggagtatttggagttgaacaagtatcatcatcataattatcagaactattttcattatgatgattcaataataatcttttagtaacggttggtattgaatgagtagcagaatttgatattgacatttgtatcatatcgaattgaatatctgaattttcggaacaatcatgtaatgggtcatttgccataaataaaccacaaatttcacaataatctgaagtattaatcattaatgaatttcgatcatactgagaatctaaggttggagaggaaactattcgttttgttctagctaaagtatttttcaacttcattgaaagtgatcgctttatagtcatttttgataattatactttgatattttgaggagtatgtttaataagagagaaaaaaaaaataagtgatgattaataagtgatgattatgatgttttgaatggtttagtagtatgataatgaatgaatttgtttataagatgaataatgggagatgtatatagttatacaaaagctggagttgtgaaaagagccaaagaagttaaccagtgaaatattaagaaaagttaaaacactcagctaaatcccatcatccagtggaaaaactcttgtttcattcatgattactatgtaaaaaatgggaaattgctattgcagaaaaagacgtttaacctcggaaattgcaatatacgagcaggattttccacttataatttgttacaatacttacttacatttacattggtaacttgtgattgttaaattactgtctatataatcttgaattgcttatctactacacaattaatccagagcaactttcgacaaactggagattattaatcgattatgtactatggattaaccctctcaatttgccacccacttttaataatattttaccttttacactcttaatcttattatgagtggcaatgaaaaccgttgaaccaccacaaaaccgttgaagagccgcacatgtgctcaaaagggaaagtgttctaataaaagcaggcaaaccggaaagccgcatttgatttgagttcccattgtgcggctcaaattgatggaaaggtctggactttcctcttgggagagggtgaaaaagaaattaaaaaaagttaaaaatttgaaaaaaattaaaaaatgaaaaaatttaagaaactctacatgctcggaaaattgaagttactttatagagcatttctcggaaattttgttatgggaattttacataatcgtctattaacctgattattttagtgctaccggaactacccactagtaaatttattacatcgtatttcaattctaatattactacctgacttaatgcaagcaattaaaagaaaaactagaaatgaaattgctactattgtttcgtcaattgaggtttctcagttaaatgaatatggtaaattagttgcaaatgctataaatacaataccacaattaaattcaattaaatcagttggtttatatttaaatatgccaactggtgaattaccaacagattatttacttaaaaattgctttgataagaatattaatgtttatttaccaagagttgaaaatttgaaaactcataatgataattcaagatttaataaacaatgggggtgtttacattttattaaatcaaattcttggaatgatgttttaaattatcttccaagaggtcgttataatttacgtgaacctccatatgaaatatctaatgatttattattatcatcaaatccttcattagatgttttattcttaccaggagttgcatttactccatctggtagaagattaggtcatggtgctggtttctatgatgatttcttagctcgttatcgtttacttaataacaataaacttccaatacttgtgggggtttctttaccacatcaaattttatttgatagcgaaaaaatacccttagaggaacatgatgttttattagattacgtagtggcaggtgataaagtctattcttgtaaagattatacaactgtataaatttaagaaagtaaataagtaataactacataaatataatgttcaaattaatacagcgtcgtctatattcaactattaaatatccaccacctccatctcattatgaaactaaaccagcaaagaaatattggaaaaaaatctcatttttagcattcgtttcaggtgctattataacatataattatcctatatatacaattgttgaaaaatcaattccactaccaaaggatgaagaagaaactactaaatacaatgaaaatttagaatcaaaattaaataatttaccactcgttaatcattatagaaatgataaatcatttattgaatctcgtggatggcatcatctagagactgcaactgcaggtcttgaaggtttccatggtactttattaactcctggtggaattgcaatccctccattagctttccattcagaaaatggtgatgatatcgtatttgttcatgttggtagaagattatcaggttatccatttattgttcacggtggtattcttggttcaatcattgatgaaactcaaaaggcaaatattattaaagaattcccatatttgactcctgatacaatccatacaaaatctcttaatattaaatataaattcccaacatttgtcaatcaatttattgttattagatcaagtgttaataaaagtgatccaaattcgaaaacttatacaacaaaggcagatatttctacaattggtggaactctgttaatggaagctacttcaacattatcagccgaagatcctctatcctttgaatcttctccatcttcttcctctaaatggttgaaatggtgatctgcttgtaaattatatatagttttagttatactgtttatatatcgcttacgtaataccactattttcattgacagaaagttcgtgcaaattatttttttcaacattaacattgaacaatttcaacattaattaaggacttgttcattttaacttctttttgtttattttacttgatttaccaacacaacaaacacaaaaaacaatgtcattccttggttttggttcccaacctcaaatttctactgaacaaaaaatttcagctgcagaagctgaacttgatatgattacaactatgtttaatcaacttcttgattcatgttacagaaaatgtttcgataaaagttataatactgaagatttaacacaaaatgaatccctttgtattgatagatgtgtctccaaatattttgatgccaatgttaaagtttcagaatctatgcaaacagttggaagatctggtgtccttcaacaaaagaaataagtttagttgttcttttatgttatttagtatataaaaataccatatcattattattatattattataattatatagcgcatctatttacagtacttgaatatagtttattattatcaatattatcataacttttacattccaaaagctctaaaaattctcattcgaataccttcaaatgtatttaattttggtctaacatcgaggaaaaatcttggttcttcaccttcattaacctttgtagtataaaaatcaataacataatcaatttcaactccgcatctattaactttccaatcatgtctatcaaatggtaattctttaccaaatatataatgatttattgcagctctcggtgtaattttctttgcatcacccttaaatgaacttaatttaataccaccacatttatctccaccttgtccgctttcccattgttggatatatctccatgcaatttcattaacttgattgtgcaatggaacaacagttttcatatctttctcctcaggttcccaatttttacgtttcatagcattgaaaaattgtttctctgatggataaacccaattaccattctctgatgtacgtggtatactggaaatttctctctcaagtgataatccttcacctaatgtagcatttgatggtgtttctaaactttgatcaagattatcggatgtacattcaatagcttcaggttcatttaaagttttacgtaaaccagtacttggtgtgacttttggatgttgtggtatatttatttgttgtgatatatctggtttaggtgtggaactccatagtatattcttccatgaccattcatttgattgattacttaatgtgtttgattgatttaatgcattttgaaactctttactacgttgtgcttctttggatttttgaatccataaatctctagttttttgatcaacgggacactttccttcactcatcgtatctttgtaaaagtcgttatctgattgataattagtaataaaatgattaataattttcaaaatttaaaacaataaaatttcctgcgaatcatgttgaagtttttaacaatcagaatgtggcgcatatatattactatttttgtggcgcattatttaaattcacgttaatccatgatgtagatttaataaagtcattatatgtataaaatataaaaataagtatagaaagaacatgaagaagaatatttaaaaaattattcaaaagatggttactggaactcagtcaactcaccacaaatttgcacgtttaaccatatctaaaacgttatctgctgcagtaccattattgtatgatggtgtatcagttgcaaaactggtttccggtaaggttgaataagttgtagaagttgtagttaatgtgacatatgtagttgggtcgactgttatgaaattagttttagtaattgtttgaactgatgtattttcaattggagtttcaacattagttgaagtagtgaaaatacttgtactggaaccataagtgacagtcattgtagcagttattggaattgtaactgttgttgtaccaacatcagcggaaatcattgtaacttcttgtaattgaatatttgatggtaatgaagaagttgtagcacaccaacttggagtgattgtaactgttgaaacggcacaagttgaagattgaaatgatgtactaagtaatgatgcaatatctgcaacatttgcttgtttaccaaggctctgtaattgagtaatgaaatcagaaatttgaatttcatttccagatgttgaagaagaaggtaatgttgtggatgcaaccggtgcatttgtaattgatggtgtttgtgattgaacaattgcagctttatttgccgcatcaacatcagaagttgatgagctatcaagtgtaacaatgacagttgatgtaagtgtataggttgtagttaatgaattaccatgtgagtcggttatcactgtagtttcaatttctggaagtacagttgttgttaatgcttcatcagaagtggtaactggtatagtctcattgtcatacctttttgccaaatacttgtaattttgaagtggtgctggaagtgcagcacataatgaagtaaataataaagaatgtaataagattgttaaattcatagttgttattgtgtagttttgataaaatatgtaatgaatgaatggatcgttatatcaactgaatgttttgatttagcttttttagtaatgaatgactggttgaatataattagatcaggtaagttaaagtgtttagctgaatatcaggtagttgacggaggttgacaatgactagtttttggatgttttaacaattgagtttgtttgtactttgagtattttaagaaaaggttttgaaaagaagtatgtttagagtaactaaaagtttagagtactggaaaggaaaaccatacgtgatatctagaatttaaagaattgtaatacttatataccctgacacgaaagttcatgtatcaattcccctgaaaagtctgtcaagtatcgtgttttagcagtttaacattgtacaaatgtattgtgataacagatacaccgtgttcctattatacagagcgcgtttgtcacatttgaaaagtaaacacaaacatttgagccgcgtttctattttctattttattatttttacacgttaagcttggcattttaattgctatttttaaacttgatactttaatattattttcatgaatctatttaaacaatataaaaaagatattttacattataaatctggatcaactttcgtacccaaatgctgacctctaagaaatatagtctctcctacactatcagggaaataagtttgttgaacttgtccgttgcgataatcagggttgtatttgtacccttttttataacccaaatcacacattaacttagttggtgcattacgtagatgtaaaggaatttcagcaccttcaacctgtgaagcattcatccatgccttcatttcattccaacctttataaatttctatacttttaggagctctagctaatttaacagcacaatggactaatgctaaatcagcttctggtaatccaacatattgaactgcattatatgcagctactgcaaatggtaaacatgaatcatctaaaacacccacatcttcacttgcaattcttatcatccgacgtgcaatatataatggatcttcacccccatttaacatacgagcaagataatacattgcagcatcaggattagatccccttatagatttatgaaacgcagatattgtatcataatgtacatcacctactctatcatataaagttggtgattttttgattaattcttttacatctttcacatcaacttcaatcacaccagaattatcgttgttatcattcattatactcgaatcaaccatttcaacaaatcctaaagcttgacgcccatcaccatcagatattcctgcaatccaatcaatcgcatcaggtgaaagtttcaatacatttgtattataaatcaattttcttactttgttgatttcaactaatcctctacctatcaaatctcttatttcagatttatttaatttttctaaggtgaaaactttacatcttgaaagtatagctttattaattgtaaaactaggattttcagttgttgcacctattaaaataataatacctctttcaacataattaagaaaaatatcctgttgatttttactaaatctatgaatttcatctatgaaaataattgttggtctcttggttaatttcatttcatttgcagcttcttcaaatatttttttacaatcagatacaccattcattacaccactcatttcaacaaatctaagattggtagtcttggctaaaatcctagcaagtgtggttttaccagtacccggtttaccccataaaattaatgatggaactttaccaagttttaaataacctcttaaaattccacgttcaccaacaagatgtgattgtccaatatactgagcaatacttgttggccgaagtctttctgataagggtagattacttgtaattttcaagttttcaatagcggaagatttatgacgtttagattctaccattgtgtgatcttcatctattgtacgttttatcaccggtgatgagtttggttgaattgttattttttcagatgaaacatttgattgtgaatcaccatttggtgtatattgataagatcttggtttttctttatgttttttctgtcctgaaagaatcgaagttagtgatttaggttcagattcatgtttaatttcatttttggttttgggtttttcaattggaggcgatgggtttggcgttagttcaattggtgaatcagattctggtgatttacttttcttatttttcttatgattaaattcacatttgtctaaatgattattgatttgtgacagttcaacttgttcagaacatataggacacttcaccattgcatgtgtaacagaagaagataaatcgattttgaataataaagatttaataagacgcgtttataaaattatttagtgttacgggacctataaagacgtgatagattataattcatccttttctaactgctttttagcttgttttttagcttgtttcttcttgtaatgcaagaaactcttaactttaccgttttttataccttcaataatcttatgtctttcactgaattcaccttctgaaggttcagcaaattgagttagaaatttggatatattatattttgataatttatcttccattgtaactattcccttctttggatccacaactaacaataccggtgaaccttcactgtattggaaatctggaatcagttccttaacataatttgcagtgtcatcattgtctatatgtacataagtgaattctaacaaatctttgaaatcaatcgcaatagatttgtatgttgctgaagctgtaaatttatctgaaaataaaataactcttggaattgttgatgattcttcaattttaagatattttggtaaatgtttaagtttgagttttttaacgaatgattttagagtacctttcattgcatcaacaaatgatgcagcatctcttttattttcataaggttgagtagcaaattgttcctttcgttcaatattttctctaaaagtttttggaggtctgtatgttataattgtaggaaatcctttaatattattagctgcacataatttttgatttttctcttcatcacaattaacagcagcaaattgtgcataattatgacctttctttgaagctttttcaaattctggtctaagttgtttacaataaccacaccaaggagcataaaatgccactatagttgtataatttgatgaataaataaaatcatcaaaattaagtggatttaattcaatgatatttttagaatttgaataatgtggaggttcataaggtctttgacttcttgcagcagtgaaagagatacagaataatagtgttattatatttgataaccacattctatttggttacaggaagaattaacagttgtctagatgaaaaatttcagattatgcatgctgtgtacgagaacctacatgaataatggacttaccggtctttaatatggtattgtagattcttttttaaagaagtatttttagttcactcatttagtgttttcattctgctattttatattacacccatatcaattgtccatctctctatcatcaataaaagtagggttatatacaatgatctcacttcaatgtcctctattccaataaagtactgatgatactacatacaatacagataacctaatccacccatagtaacagacgcgactattcccatttcctcactgaggaaattcattttttcaaatatttcactttttcactctttcaaaccaaatttcttggtttctacagcttcttatagaacaacgatgatcactaaatatttcaccaacgtcaccgtccgtttcaatccttttggtaaggaagcacgttgtgcaagagctgttctctctcaaattcctccatctttaaaaacttcatgcaaaataaaccttgaactgttaaacgaccagtcgactaagaaaccattcgtagaggttgtattcaaggataaaacaacaatgagtggtaaccctggtgaattagcacttgcagattttactaatatgtttgataaacacagtaagaaacttttattcaaggaagaagtcgataaatagtgtcatgtatatagtccacacattttatataatagatctttagttttaataatatttacgaaccattttttttttcaaacttacttactttctttatgcaactttgaaccagtattagaatatatacattgatacttgattttcaaatagacaataatgaaattatctttgaaaacggtgtataccactacaccaatcttttatgtcaatgctgaacctcatcttggtcatttttatacaatgactttggctgatgttagaaatagatggtgtaagtttaataatccgagatacttttttcacaaccggtacagatgaacatggtctaaaagttcaaaatgctgctgagaaggcaggtattgagccaaagttattctgtgatggacttgccgataagttcaaagaattggctaaattaggtgatataaaatatgatagatttattagaactacagatgtagatcattatgctgccgtcaatcatttttggaatacagtaaatgataatggttatatttataaaggacagcatagtggatggtactccgtttctgatgaaactttctatacagaatctgatattgttgaatcaaatgatgaaaagactgggaagaaaataatgattgccaaggaaactatgaatgaagttatattccaaacagaggaaaactatttctttaagttatccaaactgcaaaagaatattttagattatattaaatctaatcccaaatttattaaacctcagaaatactatgattttattatacacgaattagaatcaagggaattacctgatttatcagtttcaagaccttcaagtcgtttacaatggggaatacccgtacccaacgatgataatcaaaaaatttatgtttggtttgatgcattggttaattatttaacttcagaaggatacccaaatgccaaggaattcccaaaaccaacacatttagttggtaaagatattattaaatttcactgtatatactggccagcatttttaatggctgcaaatattcaattacctgaacaagtatttgttcatggtcattggttaatgggcggtagaaaaatgagtaaatctagaggtaatgttgcagatcctattgaaatatcaaattattatggatcagattctttaagattatttatgatgagatattccgttctagatactgatggtgattataatgagaaaactttaaatgcattaagatctgaatttattgataaattctgtaatttaatgatccgttcattatctaaaaatttcagtatcgagagagctttaggtagattaaaatcaaataaattagaaactttattaaatgaagttaatgacgaagaatttaagaatagtatattgagtgttcagttacaaatcaacaacttgaaaaatgatattgatgatgatataactaactttgatatgtacaaagcaacacataaactattcagtatgggaccacaaataaatagtttatttgatatttatgaaccttggaaattgaaggtaaaacaagatgatgatgaaatgaccaaacataataaacaattaaaacaagatataattattttcactgcattagactcattaagagtgttattgttattatttcaatcaattattccacaatactcaaagatgctattggatagattaaatgttgattcaaagaaacgtactgttgaatacgcaactatagcatctgattttacatacggtaaaaacactactttcaaaaaaggtgaaaaagttccattaacaaaacttgaagttccttcaactgtataaaatttccttgtatataaaaattacaataatgactaattgaattcaacggattcacaacgaagcgattgtaagtccaacaatacacaatgtgttggaatcactgaattttggtaatgcaattattctaattgtcactgattcaccgttcttacgtttcaattcaatcagggaggtttcatattttggttgattaccaatcacgtatacgtgtggagtttccatcagcgtaaatggatcactattttcaaatggataacaccataatgtatctggagcagttggtgcaattatttgccatagtaaagaatcttcaataattcttaatcttgaatcattcgttatagattcatcaatgaggtcttctgttacacttatgttaggaatgatgtatttcattatatcgtcaatattttcgcctgaggttgcaagaattctaactccattaatttcataaaatgaaggatttgtcaatctatggaaattttccgcttttgaagatttactaaataatgattgatgcactgcttgttttggaagaccggattcaacaacatcattgatccggacagaagactaattggaacactttgaagtagtttggaaaaaaaatcatctaaatatttgactgatgcttcttcatattgtgaattgaaatcttcaatgtatttattctttttcggtttattgcttttaatttcagtatcgttttcttgtatatcattaacacctaatgagttacctagaatcatcatttgatttattgatgaaattctctcaatatcaccaaattctccacatatccaacttgaaagcatttcgtactttgagaaatcacttttggaacttacattcagtccactacataacaatagtttaccttccttattcaagcttggttcaatgaccttttgtggtgctgcttcagggtacataatatcaacaacatggaatatacctgattcaatttccatacctaaaacaccaataaccaatccagtaactagtattttcttatttagtaaatcacctgttaatagtattctgccactttcatcttcaagccatagtttatcagtcttaggatcactatatgacgcttttctcaatttatcaatgtcttgcattgaatctggagcttttccatttaattcattcaattctttgaaatgaccttgaacggataattcaacttcttttaaaacatcgggcttgtatttcatatctgccagtgttgtacctataataaaacatggttttgaaaacggcacgtctagaattttggggaaaaacttagttttcattccattgatatcacaaccattccacttaggcattgctagtttcatgacacgttttttaagttcatttgatctatgttggtacaatgaattgaactgtgattcgtatttacgcttggaaaaagttttaacgaatgtgttgtcaattattacttcagaatacactggggtgtttctatatgtttgatccatattgtttgtcattatcacacatgcagttgacaaaatcccagacgccaaagtttactctacttttaaattatcgatgtaaaattcatgttcctcgggaaaagattcaaattttaaaattattaacatctctacaccgagcggagatggctgatttcatttaggatttctaactaatgagcaccttaattgattgttcgatggcagtggcgtttactgtttgattttaaaaagaagtcttttatttacacaattgggtcaattggtcatcaattaacaataaattataaaatatggagaaattagatttatcttcctacgcaaaggaaattaagaaagcatatgatgatgttgtttcaggtgcacaaagttatgctatttttacaacattaaaagattcatcattaaagccaacaacagtctctgatggtgatattagagattttgtctctgaatttgaagaaggttctgttcaatttggtattattagagttaacccatttggttctgatgttcaaaaattaattctcctaggttggtgtccagattctgcacctatcaaatctaaagtctcttatgcatcaaatttctcaaatgttggtaaaatattacattatcatgttgaaattactgctagagatggtgatgatttagatattgatgatattatgaaaactgtttcaaatgcttccggtgcaagatattcaattcaaagtttgtccccatcctcagcatcatcaggttcaaaattcaaaccaactccaaagcctgcctcaaatactactactgcttcaaaaccatcaccagtatcaacaccaactattattaaaccaaaaccttctttaccaccaaagaaagcagaagttgatggatggggtgacgaagaagaaattgaagaaagagattttacaaagaatccattacaaaaccttccatctgcttataaaccaactaaagttgatattgatgctttaagatctggtagtccaaaaattgaaaaagatgaagctccaaaaactgcaaccatgtcaatcaatccttccggtggtttaacttcattacctaaaccaaaaatttcaaactctgtcttatcaagatttaaccaagatgttgtcaaacctgaatttggtactaaggctccagtatttgattctaatccttccagagattcaacaaagttagttggtggattgagtagaaatttcggtgctcaaaatggtaaaactccagcacaattatgggctgaaaagaaaggtcaatataaggaagttgcaaatgatgaaaaaccagtcaattctgaagactatgaaaaagaaattgaacaagaagatattggtgttaatagtgcaaaggctaaatttgaaaaattacaacttgaagctgaaaaggaagaacaagaagaacaagaaattaagaaacacgtctcttcatttccaccaccaccggctagaaccgaaccagctgcttctttcccaccaccaccagctagaactgaacatgtttcttctttcccacctcctgtttctggtggtctaaataaattcaaagaagaagaagaagatcaagcagaaaatgatggctgggatgaagaagaagaagagaagaagaaaaaccacaagcaaaggaagaaccaaaatccagcatcaggcaccagttgcgcttccaactagacagcttccaccaccacctgctgagccaactgttgaaaaagtaccagaaccaacctcaaaagcatcaggtaataaagctattgcagaatatgagtatgaaaaggatgaagataatgaaataggatttgtagaaggtgaactaattattgatattgagtttgttgatgaagattggtggcaaggaactaatgcaagtggtgaaactggtttattcccagcatcatactgttgtcttacaaaaggaagaaaccattgttgaatctgctccagcttctgcacctgcaccatcattaccgtctagagatactgaatcttgaaccaaaatctgaaccgacaggaccatctgctattgctgaatttgattatgatgcaagtgaagataatgaacttacattcaaagaaggtgatgttattaccaatattgataaagttgatgaagattggtggttaggttcatttaacggtgaaagaaaattattccctgctaattatgtttcattacaatagtttacgatttttattcccatagtttatgtgtttgtgtttgtgttttttacaattttatattttagaatgttaaacttatttatatttagaataataaacttatttatttacgttccttagaataaattatttacgagttaaaagctatatacattgcggtttatatttgaaaacaacgaataataatggtatagataggtgataatgaataaaatagcaaaagaggaatatcagttaagaagatttatgttttttcaaacttgtctcaattaaaaaggtgaacaaaaacaggaaaggaatactctctggagttctttcaaatccacgtcttccaacaacagattgatgtgaatttaaattatgtaacaagactgttattttaatccaattgatggtgttcaaattatttaatattttttctcttatctcactgaatggtaaaggattcaaattttccacaatcggtgtatcggaaagatcattggatactaagttgtctaataattgagctacagcagctgatttcgacttataatttaggttaaaatcaagatctattttaaaagattcgacagtatcatcacctgaatcaatcccattctcagcattttgtttatcaccattttcttcctcaactaactcttctacatattcatcagggtttgaaattatattcaaaccattttcaacaatttctcttgtgacatgggaaacactaactttattcggtttcaattgttcttcttcattgtatccatcactctcttgttcctttgcgacatcattctcctcgtcttcttcatctccatttgaatcagctttcattagtatcatgttttctgctattatatgtcttacctgtggttaaaagatgtgaaagcattttccattgtttttcaacattttccttttctaagattctatttctaaaataacttttaactgttgcaaatgtacttacagataaaatgattggaaaaacacatgttgtaataagtgacataacaattagtggaaacactctaccttcgttaatattttccttgttggtttgtttatcagacttatctctaatttttcgaatttttgaaatctacaactaaacattcaatgtgcttgttgttctctttaagagtacttgtaggtaaatctgtaatatatttcggatcaatattgtcccaatcattgaaaggatcatatttagttataaatgctgaatagaatccgacagttctatcgaatttagcattagctatagaaatttttgtctcaaattgttctaaacctttataatatttgaaattaggatcactcaatttgtaaattatattttcttcatcaccaactaaaaacaaatctctaccactttgacctaaaaagatactacctaaatagttcataactgttcctttataaaaggtaacacctaaatgaggagttgcaaaagttgtaaagaatcctggtttaattgatttgaagaaatctaattcatacaattcaccaacgatatatcgacagactaaaccacctaatgaataacctataaaacttatctctgtaattgaaatatcatgttcagaatgcaaattttcaatatgttgtaataaatctggtaaaatataattaccaatagcttcaacaccatcataagttttgaaatgggagaaacattgaggtgcgtaggtatgtatattagccatatttgaatcatcaaggactatgatgaataactgattccagtctagccatattttgggctgatccccataatccatgcaccaaaactatcaagtgatctcttcttttaccttcttcagccatgattatattgtaataattattctataacaaaagaaaaagaaaacagtttgccatcaaaagaaaaagacatttactatgtaacaaataaagggacaaatttgatgggtttaagattagagtggaatcagccgtctttttcaattgtcggactttatcttttatatccttaatagtgtagcggtttctttctttttatgtgattattaggtggtatactatacactacgttataagatgacacaaacaggctgatggtattactgtaacattatatcataacatctctcttgttgtaattttaagttgatcatggaagttaccacacagatatatatttaaaaaaaacattcccaattttcttagtgtaggggggatttagagaaaattttaaaatttcatgagaccacacatctcgaaatgctcagctttgaagatcaccacaacttctttggattatttacatgactgagaggcaagatggtacaaagtcaaagagcattcagctctacaggtaaagcaatattagcgggtggatatctagttcttttccctgaatataaagcatatgtggttgcgttaagttccagaatgcatgcattaactaacgtaactgatttagaaaatcagattggtatagttaaaattaccgttgattcaccacaattcgtcaatggatcttggagttatgaagttgatttgagtgaaatagaaaatcaggggttaaattttcaattaaaggagactaatggtagacgtaacccatttgttgaggcaactattgtcactgtacttagttacgcaattggtgttgattcaatcaattctagatatgttggtaaaaatattgaaatcaaaattttttcagatgcagaatatcattccaaggatgaatcagaagagaaatcatccgctaatggagaatacaaattcttatatcattcaaaagaaattactgaagtaaataagacaggtttaggatctagtgcaggtttggttacatcattaacagcagcaatattatctaatttattttcatcatttactataaacaatgaatggaaatcaaaagttcacaatatagcacaggttgcacattgtaaagctcaaggtaaaattggttcaggatttgatgttgctagtgcaacatttggttcaattgtttatcaaagatttgaagcaagtttgattaataaagtttttgaatctagtattgccgatttagttcaccttattgacaaagaaaattggaatatggtaaatgaccaatgttcattacctaagggaatcagattactgatgggtgatgttaaaggtggatcagaaacaccaaaaatggtttctaaagttatggaatggaaaaataaaaatccagaaagagcagctgaggtttggacaaagcttaataattctaatatgaaattaattgattcattgcaaaaacttgatgaattttcacaaagggaatcagataaatacgatcaattgacaaagtatgtttctaaaatgaatgcatctgaaattgcgttattaacaaaggaaaatctatattttgcacaaatttcacaatctattcaatgtatacgtgaatgtttacaaattatgaccgaagaaacgggtgcatcgattgaacctgaatcgcagactaaacttatagatagtgtttctgccattaccggagttcttgggggtgttgttccaggagctggtggatatgatgctatatgtatgttagttttttcatcagaagttgaaaatattatcaaagagacatccaaaagtgataatccaattctcgataatgtaagatggatggatttaactgaacaaagagacggattaattgaagaaaactactccgattttaacggtttttagagttaaacttagtaaataaattttatattgaattgtaaactatttttgctaacttaagctttcgcggtaattacgtaatctcataataaaaaaaaagggggtcgtgttacctttatagcttggcttgatctaagtaattctttaaatcagatggcaatgatctagttttgttaaagaatcttttcgttttttcttttttatcattagcaatttataaaatataagcgtgtttgaattaataaagtatttaatgcaaatatgacgctgatatatacagcacagagaggagctaatacaaatttagaacggtttgatccacccctcacattagtaggatcacgtactagttcattttcaacacaatcaacttcgggaagtcttaatgattttttagatttatatgcagatgaggaaactatagatgaattacaatcaagtgatcaagcttccgacaattccgtaaatgatatcaatgagtttaacacggataaacgtgatcctcctccctcaaagttattaataaaaccggagaattcatctgcatctgaaattttgcctaaacgagaaaatccctcgacagtagtaactacggagggtatttttaacaataattcacagctatcactatcaattaaatcaccacaatcagtggataaggtagatttaaacaaaggagattctaatttactattatctgaggaagctaataatagatatctacaaactgatgaaattaaaaatacatttcaaaagtttctcagcaacactaaaaatactggattcctcaaattagagcaacaaaattctactattattgaaaaagaaaattttaagatgcaagaaaatattgggctatctgatgatattgattctaccttaaatgaggataatattaattatatcaatactactgtacaatcatcacatgtacctaacactcatgtctacacttttgacgattcaaatgaaaccctgaatattgataattctatcttagagattattgaccacttaggaaacggtttaaacgttaatgatgaatttgaactcaatatatttccagaggaaactagagatggtgatttacaacaagtattaactcgtagtggctctagacatagtatgggtaataatattgatcttttaagtcttgaaatgtcaagtgaagatgaagaatatgatgataatgaaagatttaaatcattttttgaattagattatggtttttctagtactacaacaaatgtcagagagactactagtaggattatagacacaaacaatactgaaatatatgataatgtgtccggtaatgatttaccacctaacataaattggctaccttcaactacttcacctgcaacctattctcttcattcatcaaacaatagcagagtgattacagatttagatataagtgttcagccaaatattgatatcaatgaagctcttgatgcagattctattggaactgagttatcaaataaagatttagatatagcaacacccaccgatgatccacctccatattctgaaattgatttatatcttaatacagattcacaaactaatgcacatatcacaattttttccaataatgatgaaaatcgaactttcttatcacctgtctctgaaaataatgaacctgaagctattgaaaaccaacatgataactctgatatttcaacaatttcatcctctagtaaaatgaaaaaacgtatttccattaaagtcaagaaaaatagtgatggtgaattaagtagacatgcaagtgttgattattatcaaatggaaagatttttacctccatataggtcattaattaatccaaagaaagtatatgattatagaacaaatacatatcttaacacatctgagaatcaaatagagattattaatagagttggtgccaatagtcaatcgatggtagctatacataagaagaaaagagatagcagagttgtttcaatgatactaacatcaaataatcataataatttagctgaacttctacttgactcagcaaacgataattcttccatcagatcgaaaagtatttctattagatccattgcttccaaaccaaaatataaggccactgcgaagtttcaggatttaacaaaggatatacgtcaaagaattctcagctttgttgataaccaaagagatttagtttcttgtttatacgtctccacggaatttaaggaaatagttacacccttactatacaaatatcctaaatttacatccagttatagattggcacagtttgttcacactttaatgaataatgaatcattggcattaattgttaaagttttcgatttatcaaatataacattcccagttaagttaactgaagctgagaaactgaaataccaagataaactggtttatggaactttcacagcaattgaagttctaaataataagaataagattgcagatgctggttggagagatttcaagtttaggaatcatccattatatggtgattttaacaactggagaaaacgtgcaaattcaggatcaaccatatcatccactaattcatcattagaaactttgtttgataaaagcctatcaacacccaatctgttagagacaaagaagaataaaaattcatataatagatcaagatcaaattctggttcagataatgttttcaaaaagaaaaatgttaatggtccaagacaaagatcaaattcatcagcttgtgacactaataaaaagttaccaaatgataataataataataatagtgctggtagtggaggaggaggatttaaatctctcaagaaggcttttggttttgaatcaaatgtcgatgtaacaaagaaaaaacggggaagcagtccagtaagaaaacctatgttgaataaaaaggctgtatctgcaaataatctgatctccactggtaatacggttaataccattaataatagcaataagaaaaagcgtgatagcaaggttcaagttgaaattaatgatagattaccatttagtacaacacatccaaagattaatactatgttaaaacaattttgtttccatagggatatacctgttgggtatataattcatgttttaatggcatgctcaaatcttgaagaaataaattttagtaagattattatttgtaatgattataaacttagagattatgttaattttgattggtttatgagtacaggtgttgaaatttctcattcaggtcaaccaagagatattgatgaaaataaaccaatattttggagtgatacaggacgtgaattaaatattagtgatgaatcattttttagaggttatgctgaaagtgtttcatttaaagatatttggaaatgtattgtacggttaaaaaatattaaaatattaaaactaagaaaattaaattcattagaacaaacaattattaaagattttgtaatgaatagtgaatttaaagaaactttagagattttagactgtagtgattcgggaatggttagacgagatgaatggaactatatctttaaagcagaagattggagagaatatttttcttagaatttccaattaatagtatatgggagcttaaaagttgagttgccatacatagcaactatatttagaagttttatttttttttttcaacctagtcggaaattctttaaaaaaagtagcaaatgtgcaatttcctatagtaaataaaaagtataaatttgtaaaattaaatttgtttagaatattagtattaaatataataaatgttaaaaaataaaataaagtgaaacggttagtgtatatgcataataacaaaattattatttaaaatacaataggttagagagcaaggctgaaatttggtaaaacgtattaaactcacgaaaccaatcaaagggtaagattcgtttatatatattttattttttgaaacttaataattggttcaaagagaactcagatttcaataacaatacaaaagcaactaacaagagaatatgccaaagacaaaacgtatactgtatcttgccaaacggtttttcccatctgttttagtgaatggattttcaactccaaaagcaggatataacttgatacctgctatatttagataataagtcctaattgggtaaggtaattaatacccaaggtaataattttattgtacgaaaaatattttttaaaaaacgtatgcacaataggttaatttatttatttttccgctcagtaaatccggtagaaacggggaaaagggtatgtagtacgagaagatgtaaaatagctagaatacaaaaactttatatgaatttgtgtagaatgtgaaaatagtgatgttagttttggtacaaaccttgatgtagtgtttgtatgttggtttaacctataatttagggtcaagagtggaaaacttatacactaaaagaaattaagttacgcttgctaagaggtatagatagccgataaattcttgtaagtgatcaagttttaaaatgtaacatataagtacaataaatatacgtaattctcaaccacttggctcaatagattaatagacattatgtaaatgaataaaattaagtgaataaactgaattaaaaaaagataatataattataaaccagagtttgggcgtgtgaaaaccagccattctcgtaataaattgttgtattttcaacaatattgagaacaatacaactggaatattatgggtgattcaggcaccagtgatacttatacctctaatttcaagtgtggtaattaattatgaataggtatatatctacatattgctgttgtatatgcataggggaaattattgataattcatagatcatacactcaaacattaaagtataaaaacggtagttagtccacgttgatatgttactttgtttctttttactagattagatttgctttgcttttcttctactgatatataaataaacaacagaaaactcaagttataataaacgacattcagtataatgatatttaaggtaaattaaattagatgtcgaatttgtgacgattcctatcacacgaggcaaaaaatttggggaaaagaaattccctaatatacattgaataaagtactcttctttttttatgaaaagattaataatgtattgaacttctctcatactctacaaatacactgtgttgctggtataataaccatatatattattgaatcacgaatgatagatagatacacataaatgcatcaagtgaaaatgtgacgacagcttttactcatgttctacaatcaagctataatacagagatttgattatatcagttaaattgagagattgtagggtatgagagaagctgagacacttgtccacctgatgttagtctagtaagttcggttatcaacagtgtgtaacaggaatgtataaaaataaataaataaattaataaataaattaatctaatctaatctaatcgataatctaatccaatctaatcgtagcaaagcaaagcaaacgacgtacaaaatagaaaaaattcatggataaatagcagaagattctgtgcgtcaacggtgaaaaagagaatagatacattcagcgaataattccttcttcaaagtggcgttggtgggggtagtggtaatattagtgggaaactgggggattatagattatagtgaagcagtgaaagtcccgtccttccagtaattgatgtattgtgataattacacacccaaatgtagcctttattcttttctatattatattacccatcaagttcttcgtcttgaaaggtgtctttttttgctatttggctatatagttttgctttttggcttttgctttttctctcattttttacgtatactctcctgtcattagattattgaaattaaaataacttagtgagataaataataatattttagtacacatacatacacacaatctacatactatactctttttgatcatgccactgcagaataatcatttgggtaataatttatatctatatagtatgaacaaggggactaatactaatgtcaatggtaatggaattggcattaatggtaataatgttaataatatatcatcaataaatactccaattcatcatattgacacatttcctgtacatttgacacgctatccaatagtggatccaaatcattatcctcaatcatttacgcaacaatctcaacaacaagtttctcaacaattgtctcaacaacaacctattccacctcaacaacaacaacatcaacaacaattacaatatactcatattcctgtacctaatggtcaactacaattacaagattcttcaataactggtggttcaacttctgcacagccgcaaaacattcagcaacagcaacaatcatttcatcatcaacagcaacatttactatttcatcaacatcatcaacatacacagcataaccaacatccacataatacactaatacagatgccccatccacatcaatatcatcaatataatccgcaacaacaacaacaacaacaacaacatatattaattaataatacaattaataatgaatcaaataaaatgaatcaaaaggataataaatcaaatcctaatactattacgaatacgagtacgaataagaaggttgatttgaagaaatcaaatgaaattcaaactcctgaaaatttagtatctactgagagtatatgggaacaatatctgcataataatatattgccttcaaataaaaataattccaatatcaatcataataataacaataacaataataataatgttaataattcaaattctagtaataataatagtagtagtaagaaaagaaaatcgatatccaaaccaactaatacaaataataaaaaagtcaagcggaaagcaaaatctggaagttttgataatattataataataagtgagcaaacgacaccagaggttgaaaaggtaaaggaaaaggaaatagatacaaatgttgaattggagacacaagtggatataaataaagaacaaccaaaggaatctccaacaacaccaccaaaactaacattaattttgaaacctcaaaaaatacctgatattttaaacaatactccttttgagaatagaactaaaatttcaaatattttaaatccatcttcaccaattgaaccaaaagaagataatacacaattaaatgatactcaaaagaatgataataaaaatcatgatactttagaattgattgtaaggaatattgatgaaaacgttaatgaaacatctgaacaagttgatgaaattaaacaaatcaaaaaggaaatatctgaatctaatgaaaagaagcaatcagaagaggataaagtaatggaaattcaaatagatcaagataatactgaatttaataatcataaaaaaacagagcatattgaaattttggaggatgatattcaagaattcaataatgataatttagaaattacggagaaaattataagtttcaaaattgacaaacaaaaactgagaaagatattaaaatcaaatgatgaatccaataataaacaatctaagaaaaagaaatcatcccccaagcctgaaaagaaatctaaatcacaaactaagcaaaaatcacagaaattatcaataactcctgaaccatcaataaacgtagaaaatcaaatagtcgaatataaaccaattgaatcatcaaatttagttgtacttaatgaacaacaaaaaaatgatatatttaatcataatgaagatgggttatatgaggaagaagttaataaattatgtaatttaaatttaaatcaattacctgaaggttatattccattgattatgacacctaatggtatgatcataccagttgatgtattaaagaaacgtggattgattgtcaaaaaagaggaaaacagagcaatggaagtagtaccagaactaactaaaggtgaaattactaaaattactgattcaaagccacatagtgaagaggaaatggttgaaccattagaagttttagattttgataaattcgatcaatgtgttgcactttcgttatatttactgagtaaagaatctaaacttgacattaaatatgataattatgaatttgatgagaatgataaagaacataaagaatggcatttactttatcaaagattacttcaacttgaaaaattaaaatttattcaaagttataaagatgaacgtaataaattagtcgagatgctagctaaattaaagggtgaagaaacagtgggaaatgatgataagtttaagagtaaggataaattacttgaatttgagaaagatttaatggagatgagagattatgaaattttaagggccaaattaatgcatgaatataatgagaaaagtatttatttacaatatctaaataatgtttcagaaattgaaagtatgggatgtttagattatgctgttagattaacaaaatataaaaattatttaaatatggagaaagaaagactaattcgtaatgaagagaagattggtaagatcaatacagttaaaagtcaaggtatttggaataaatatattcaaagtgttgccaataatccaaataatgataatgtaattgaaattcaagatgaaattgagactcctgtgattaagaatagaagtagaagtagaaataaagctagaagtagaggtaaaagtgttaataataattttaattataataatatcaatgatagtaatattgaattaatatcagagaaagattttattttattaaccaatgcaaattctagatcatatagtacatacgttttaaacaattcattatatagtaataatgaaggacaaagagagataattgagttagttgaatattatttaccagataagagtgttttaagggaattatttaaagaagttaaaagaaatgatcaaagtaaattaaagggaattaatgataataagaataaaaggttattatcaattaatagtgataaaggtaatggtatgattagtacatatggattaaaggagagtaatgttggatcaagtaatagaattttaaaagaattgcaaattgatggtatgaatgttgatattaatgataatgatagatttgagagaagaggagttggtacacgtaaatcaagaaattctaatattttcacagaggatgaaatatcgggtaatacagaaacaggagatggtggcatttccaataatgataataataataatacagatagagatagagaatattacattgataattacaataaaataataataataataataataataataataataataataatgggcatggaaataataatagatatatgaggagatgtaatgttacaaatttaagtagtagtgatgagagtaagaatgaagaaggtagtgaagttggtaaagaggttaataataaaaatgataattcagataatgttaaacgtgaattaaatattacgagttgtttagatacttcattatgtgatattgatagagttaaaatgttaaatttaaatagggatgaaattaaattgcaatatacaagaacatacgcaatgccacatgggttgcattgggaagaaattaatgaagatttattatatttacgtgaaatgaacgataaaaagaagaatagtaaaaggaaataaagtgtgttattatcttgtgtaataataattcaataataataaaaatagatcgtattacgtaatacagtaattataaattattagaccttcccaattaggaaataacgaaatagcgaaatgaagaagttacccggagaatgggaagggggggttattcttacagtagggggggtttctctgatgttaatagagtatagtaaagtgtagtatactattagtgtagtataccagtagtagtgtgataccaataccaataataataccaataataataaaacaccatcagatactgccaaaatacctaccaataacaataacaataatagccccatagtaaataaaacccaatttttactaacaaacaaaaaaattttttccaattttccaattttccacgtcgtcgaaaaaaaattgtaattttttttcctcttttcaccaatcgtccacttgttaaatggattgaattttttcaacattttttttttatttattatgttacttttactttctacttttcactttttgcttttaacttttcattatattctttgatttttcttaattaatcaaaagtaattagtaattaataaaaatggctgaagaagaacacaattttgaagttgcagatgcaggttcctcattaacttacccaatgcaatgttccgctttaagaaagaacggtttcgttgttattaaaggtagaccatgtaaaattatcgatatgtcaacttctaaaactggtaagcatggtcatgcaaaggttcatttagttgcaactgatattttcacccaaaagaaattagaagatttatctccatctacccataatatggaagttccagttgttaaaagaaatgaattccaattattagatattgatgatggttacttatcattaatgaataatgatggtgatatgaaagaagatgttagagcaccagaaggtgaattaggtgataaattacaatccgattttgatgatggtaaagaattagttgttactattgtctctgcaatgggtgaagaagcttgtatctcattcaaagaagctccaaaatctgattaaattatttataattaaatttaatgttatataatataaactaaaataaaattataatatataaaaatttttaataatataattcaaagcattttactacattaacattaattttactacattaaatattaaatatttattaattcaccatttataaacatttcatcaagtattgtttccattttgtaaaaattaaatattaaatcaagttcacttacattattaaaatgttcatctaataatttaacataaattggaattgagtttaaatacattgattgattatcatcatcatcatcatttatacaaattataaaattcaatccattatattttttgtaaattaacttacaattatcaataaattcaatacaattatgatttgaattattttgattaaacttattattattattgattgttttataaactaatttaattatttcatcttcttcattgattttataatttgtataaaatttacttagacgtactttaccttgtttattcaaacatagtataaatttaactcccattgtgttattataataaggttaattagatatatctactaatttactaagcttactgtcatgtataagatgatatcaagggatggttgacattttcaatccgtcgatcgacttttacaatagaatagcttcagattaggtgtatataatgatcattgattcataattacatgtaaacatatcaattactgatcgtatagtatatcacccataataaacgtgtatttctacgacgtataataatattaatactctaaacccacacagaacagatccccttaaacaagtaaccaacctacaggaaactcgtaaactgtaaattaacaataggaaacacgataaaaaaacctgaaaaaattttatttttatttttttttttgatattttgatattttgatattttttcagttttcttttgaaattcttgtttctttttctggatttataagtgtatagtattctatttgttttgtctcttcttaaagatcaatgtctgcagcatttgaagaattgagtaaatacaaaggttctaaattaaataataataataataaaaatactaataagcttcccattaaagacataaatacaactgataaatcatcaaattcaattgatcaatcaaagaatagaaggaaaaaagttaatccattcattgaaaatttaattaaaaatccaattgttttcaaatctgctaaaatacctgataaagtaactataaaaccttcaagttataaagttttcaaatcttctaaaaattctaaaaataaggatagaaaggaaataaaagaaggaactaatagtgacacaattgttaaagagaaaaaaattgttagaccaaaatcacttgctgaagctattgcaaaatattcaaataaacctcaaacaactgaagagagtaatattataaataataatatgaataaaaataagagtaaagataagaaatctaaaattgattccaaggaaagattaaagttgttattattaaaacaagtcacaaagtaataatactaatattgatactgaagatcaaggagagagtaaaagtgaggaacaaacacctgatcaagaagatgcagtaagtaatgcagaagatgacgatgaggatgaagatgacgatgatgaagatttccatactgctgaaagtgaaggaccatctgatgaagatgatgtagaagatatttcagaaaaggataatgaatcagacgaagaagaagaacttgctgataatgacgaagaggatgatggagatgatgatttagaaactttaaagaaagatcttaaagatgatataatagaaaaagacgaagaacaagctttaaacgttgaaactccaccaacttcaaatgatgatgattccactactactaacaatacaagtaaagatcaactgattgataataattatccaattgaagatttttatgatataaatgaattaaaagttgatcatggttcaagtaattcgaaaagaattaataaaagttggggttatttagttgataatactgttccagttggtttaattaatcatggtgttacatgttatatgaatgcagctgttcaatcaatgtcacatatagcttcattaactcattatttaattgatgttcataatggtaaatataataatgaaattaaagataattcagttacaaaaattttagcttcaacaatttcaaaactttataaattagaaaataaaaaatattcttatattaatccaaagagattaattaaaagattagaagatattaattgtatgatgtcagaatggcaacaagaagattctcatgaatattttatgtcattaatgtcaagattacaagaagattcaactccaaagggtgttaaattaaataaaagtataatttatgatatttttggtggtttattagatcaaactgttacatgtacaaattgtggtcatatatcaacaactcaacaagaattttatgatttatcattaggtttagataatagaaagaaaagatcaagtttaatgagtgatgcaaatcaattatttcaattaaaggatcaaattgaacaatgtaattcatcaaatgaaaatgaaaaaactcaattatcaaaaattttacaacaaagaattttattagccaaaggtgttataaataatgaaattaatgaaaatgatacattaaataatgatattaataatgaatctaatgataatgaaaatgatacagtaaataacaataataatgaaaataataatgatatacgatctaaaaacacagaaacatcatcaaataataataataccagtaataataataataatagtaacaataataataatgaacaatcagttttaaggagatacattttagaaaactcaataagagattttttttcacctgaaattattaaaactgataaaagagatcaaacaggatatacatgtgaaaaatgtaaaaagcaatgtaacgcaattaaaatttcaacaattcaaagatcacctgaaactttatcaattcatttaaaaagatttagatttaatggacaacaatcacaaaaagttaaagcaagtgttagttatcctgaaatacttgatttaacgagttattcaacagatatttcaactccaattaaatataaattatcaagtgttatagttcatcaaggtagatcagtttcttcaggtcattatattgcacattgtagacaaccaaatggtacttgggcaacatatgatgatgaatatgttaataaaattccaagagctagtgcattgtctgatcctggtgtttatgttttattttatgaaagattaacttataaaggaactcataatgaaaatcaaaatgagaaagaaattgaaaatgtatctgcaactgcaacaactagtccaaaagttgttaaatcaaagaaaagaactagggatattaataccaataagaataaaaagggtaaaagtttcaaaaataaaagaagaaaataatttatacaataattttttcctgtttatatttttatcattgtatattagtttataatttttttatttatttacaagttttatttatttataaatgtattactactatgtatgtaagaaaagaatggaaaacaatttctatatattattagtttaaacgacaacttcaatacctaaagttttagcagtactaataacacttttacaaatatcctttaatggaatttcagcatgagtttcatcagatttcttaattttagcaacttcataaacatgtttcagtgaaattgtacctaaataaccttgctttgcaaatttacccttacctaaagtatcactacctttttctttatttattaattgtaataataaccacgacgtagtgggacttttagttgtaaatgaaaatgatctatctggtctaacagttaatttaactggaattggtacatcaacaacatattgagctgtacgtgcattaaattctttacaaaaatcaattgctttaacaccttttgaacctaaagctggaccaactggtggtgttggtgctgccttacctgcaccaacaacaagtttcacagtgacgtcctttaattgtcttgacattgttgattgattataatattaaaaagaatttggtgatgataattcaaagattcaccaagaattcatgaagttagaatggaagaaaaatttcataaaatctgtggaaactgaaaagtcgcgactgtaaagttttatatcttaatatctatactataccttgctcatagcaattcatctctattaattttgtaatatataagttaaattaagttaaatgtacataaaaaagaagtagtttgagaaatataataaataaataagatgaattgaataatagtaatagtaatgatttaaaatttcctttccaaatgtatccagcatagaaatgaattgtaaatataagaatagatttattttattttttagcagtaccatttttccgtttaattctttcaaatgatgcaatatgagcaacactttgatcaacttgcgtatgttcatgatcatttgcaggtattaatttaccatgatttgattgttcaccattttcatcaatcattgtacacatttgaatattacttaaccatggatctaaaaagcatgattcaatatcaattctacatgcaggtgctaatctaaccattttactaattaatggtctaacttcattacttaatgcacctaataatctatcttcacctaataaattggatgtatgtttagcttcaccggttgaatctttacctggtgttgacgatgtagtggtactttctttggaatcaacaatatcatcaacttttgcttcaattatttcttcattttcattttcttcattttcttctaaaatatcatcttctttaagttataacttggtggttcgggtaatcttttcaataattcaccaaatgtaacaccaggttctcttgatgcaaatgctttaaaacttgcatcacttaattttggaattttccatggaaattttttcaaaaccatacaacaataaataattgcaactgaccaaatatctacaggtcttggatcataagtattgaaaacacaaacttctggtgctaaataaggatctgatccaacaataccagttgcttcaattaaattattggaaaatggatattgataaacaactgctgaaccaaaatcgataattttaacaataccatgtttattaataacacaattatctaattttaaatcacgatgtgctaaaccaattgaatgaatgtattttaaaccatttaaaatttgtttaaaacaacaatcaatttcttcaatacccattttatttgacattacaattgcaaataaatcataatcacaatattccataacttgaactaatctatcattttcaaaactaatttcaattgtttcaataacatttggatgttttagtgttgaaccaatacaatattcacttgtaattttctttgtataatcttttttactctcagttgtaaactttgctctaaattctttaactgcgaaaacttttgaatcgcttaatcttcttaataatttaacttgaccacctgcacctgcacctaaactttcaccaaatttaacatatcttttactaaatggaattgatgatgtattaccaccaattgataaattattaagtgttgttgaagatgatgcagatgttgataaattatttgatgtactattattagtatcataacgacgaaattcatgtggtgatgaaccttcgccataaattgatgttgaacttgggctatcaacaaatctattattcaaattggatgaatttttcaaactaaaatttgaatttggtgtatttaataaatttgaactatcagtatgtaaattggtatttggattaatcgtaattgcagatgggggaatttgaattggattatatgtagttggcgttgttgcagttgaataagaattagtagttgaaaatggacttttacttacactaatattaattgaattactattagaatgacttgatggactttcattaatgttattgttggtatttgaattgaatggattattggaagaattgttgttattgttattggtattattatttccattaggtgtagtaccagtattatttctttgagaacttaaacctgcacttaatttagaaactcttggagatgatgagtaaatattatttggagtaccagatattgaacctgatcttttaaagaatcttcttaaatcagccattgatgaatgtcttgttgatgtcgaggagttgaaactttcggaacttgattgagaagttggagaatgtaaatcatgttgaggaattgaagttgagaaattattatttgataatgaacttgaataagtatttggagatggtggtaaattatcaaaattggaagcagttgatcttcttgattttgaaaagaaatttgctaatgaagaagaagacttgtttgaattactattgttattattgatattactactaccgttcatactatagttatttaaacttgaattagtagtttttaaagatgaagataaagttctagcttcaattttttgttttgaaacaacgaatcttgaatctatttgatgagatgcaacagttggagaggataattgattaccagtaataaattgaccattcattggcattgttaaatttgtgaatgaagatgaaatatttaaacctgactgagaaggtttatgattacctggagctgcataaggtatacttgaagataattgggtgaaagaatgggaagcagaagttgaaactgaattggagatagaatttgaattcgaatgggaatggctgttactcttatttgaaattacgggtattgcagttgatggtctatcttttaaaatttgatttttattattagtagaagcagaagtgttatcggtagtaatatcatcgtgaatatgtatagttgatttatttaaaccagacattgaatttgatgatgaagggagactattatctaaattggtatttgttgaaagttttgaaagtttacctgataatttaattgcggcatttgcagcatttgaagcaatcgatgattgatttttcaaatgactattattatcagtatcatcatccggtgaagtaccaacagatacagcagttgtgattgtaccattatatgaagaatgcataatagttggagatgaagggggtgttgaagatctttgcctttctctatcttgatgtattaatttagtcaaagatgactgagctgtcttttcagtcataattgtaaaatgtgtgaactatttaatataacgtatacgtaatgagataacagtataataaattagacttaaattgtaaatatagaataaaaagtgttatatacagattaaatacagaatagaacaaaagtggaagataaatcaagaaataccaatatatacgaaaacggtctctgtaataaaaagaaggaatttcaagcttttccaccataattcgcgtctctcattggtcccgataagataacagagacctttttcggaatttgtactgtacctcttttcgataactatcttcacctctgcatcagtacttgcttctcttcctgttgttgttaccgttattatcgtagtaattacgtcttagacgtcgtgtctgttgattggaattactgctgctgctgttattagtactcccagttgccggtggtggcggcggtggtggtaacggaggtggcggtgcacttctccttggaggaggttttgcggctgatgatgaagtggtagcagaagtagtagtagtcgtggatggtgatgatgatgatgaatgttgactggatctttgattgtaataggaattgttctggtattgaccttgaccttgactttgacgttgacgttgatgatggtagttattgttattattgttgtagtgattttgactatggttttgattgtaattgttgtaattgttgtaattatcatatttattgtaactacttgtagtattatgttgatattggtttttttgactttgattgtgattgtgattttgatttccataccttgtatgtgatgatggaccatttggaatagattcagatttaactggggttctaggtgagcttctatttgaagattcctgtttaactctttcaacttctttctccaatttattcttctcctttacatcatccttttcaatattatgtaattcttgtatcttttcaacttcctctttgacttgttcatcaattagaatatcttgaacatttacgtcttcattgagactttcaatatcttcgatatttgcaatactttcattattgttgatactttcaatatcattggattcattattttcaacttcatcaataacactttcagctcctgtatcttcagttttagtctcttcttcatcaatttccatttcatcaccttcttcattttctggaacttcatttttaacttcacctttttcttcatcaatatcgttgaattcttctttgaattccccatttgattcatctctgatgtcttcactgactgtaacatcttcaaccttctgatcatctccaacatcaggcatgacagcgtcatcctttgtatcattaacttcatcttcagttttttgttcaactttttcttcaactttctcctcactattctcttcaactttctcttcaactttcttaactctactctttaacccaactaatccataaggtttagctacaggtttattaactaactctctctctttctctaattgcctttcattttctttttcttcatcttctttagctttcaaaattgcattcttttcatctcttttcttaatagcttctaatttatcttcttctttcatttcataaaattcccaaattggtacatatttactatcttgaaatttaattaatccaattaatgccctacttgataatttgatatcttctctatcatcattttcaataatttcattcaatttatcatacaaaatttcactgtgttctttgattactggataattattcattataactttcaaaaatgaaattatattatttaaacttgtatagcttttagaatttaatgttttgataatttgatttaataataatacttgccaattaaaataaatctctttaaattccttgtaattttcaaaatttttgctttccttattgaaaatttcttcatcactccaccaattatttaatttctctaatactatttgataaaataatgctaaattttcagtttcaattgttgtatttgtaaataatgtgattggtaataattcagtattgaataataagtttaacacattcttcaatgaataatttttaacattaacaacggaattaataaagaataaaaatttaccaacgaaaattgcatcaaatgatgattgttgaaatcttggaattatacatttctcaaaaatatgtaataattcttcctcatcaccattattaaaccatttatccttctcgttttcaattttatctaagattttattataattagtttcatgagtttctttatcaattttaatatatttaacaattgaatttaatttactatattgatcttctaatgatttaatttctttttcatttaaatcttccacgcgtcttaattttaattgaactcccttaatttgtaaatttaaatcttcttcctctgtactatatgaaatatcattaaaatcaatatcatatagtgataatgtccaaaaaattgaaaaaaattcaacattcattttttcaaagtcaacttttccctgaaatgtttcccttattggtgtataaatatctgaatcataaaatttaactaataagttttttctccatatttcaaaaacccattgaatttcaatattaaaactattgactaattcattaactgagtaaattctttcttcaaattcatcacttttcaaattcattataattataataattaaattatgaattaaggaattgatatcatcgattctttcattgataaatttcaaaggtttttcatcttcaatttcaattaatttataattcatttggcataaaattataattaattcatttaataaattattttcaattaatgttttcaataatttatttgaacttttaaaattatattctctattatcattaattgcaaaataaactaattctcttaaactttgacccgaatttaatcttaaaatttgtttaattgttaaattattatttgatttaatacctgtcattgaatcaattaattcctttaaaatgtaaattatattgaaatcattgatcattaaattattatcaataaattttaaaattggtgataattgaaatgattcagtatataatttacttaatttaccaattaattgacaaatattaacataccactgggaataatttataccatcattttgaattttatttttatttgatgataatttatttaaaatctgataagtaattacatcccatgaataatcattgaaaaactttgatgattcacaaattaattcaattaaactattataactttcaatatttgttaaaattgtaaatgatgaacacattggattaattgaaacaattttatttaatgatctacatgaaatattaatattttcaattgacatccttttcaatatatttttagttttcttttcgaccatttgataattataatttaaatataaatcctttttatagtttttcatataatcatcatataatgaataacgtaattcaatcgaataattatttttgataatatcaaaagtttcattaattaatggtatgttattagtaaatagtaaacttggaaaaatatgtaattgaataatttcaaaccaaaaatcggcgtctttgatgttttctttcaatgatttatccataattctaacaattttagtcattaatgtattattttccgatattttatgtcttataaatggtaagaatttattgagaatatctaggcattcatcaatattcatattggatatatttgattgttcattcaagcccgttatatcaagattatcaacaaaagaatagtaaaattcatcaattaattcctctaataatttatttaatttatgtaatataatatttgataataatggtatttcagggaattctgacaagatgataaagatataatccaataatttataatctattaaatattctaggagatcaaatttccaataacttttgaatttttcatcaattgaaagttcaataatttcatcaacttttttattaattactgattttgaattatttgaatcattttcatcatctgaatctggtagtaatggtgcagccatggctaaagctgaaagacttttaaaacctgatgcatttttcagatttgtttgtttctcttctaacaattttacaacttcattataatcataaggttttaaacactcataaattgaatcaaaatctaaaatattttctttgattagatacgtaactaattttaattcaatacatttatcagatcccatataattagttaaataattaataattgttgattgagttgaactatttaaatctttaggtctccaccaaattgtatttttaaatatttcaattaccaaatttggtaatttatcaaaatattgtgataataaatttaataaaataaggaaacatcttttattatctagatcaaattcaaaaactattttcatcaaaagatcaattaaattatggatattttcaaaatcatcattttggttactcatatatgataaaattgcagatataaattttgaataaccttcacttgattcatgtaatgaagaataagaatcaattgagaagacacgatttctagcatcattatattgatatttactaaaatctgggaagataccttcacttctcaataaatttctattcaaatataatattttaaatttattatcaattgtacaatcttttataaattttttaatattttcattgtcattattaaatgaagataataagattattaaattttcattaattttatctaatttttcagatgaaaaattcaaagacgataaaatttccgaagataaattaataaataatgaacaagaggcacgatttggatattcactaattgaaatgaaaatttcatagaaaacttttaaaatatcaacttcatttgatttcagtttttcaattaattgtaatttaagagtatttgcattaagtaagaaagaatctgttataaattcccaatcatatgaagctttaatttttggattgatagattcaattggagccgttacctctgtgaagccgggtataccttccattagatataagatggatttctatatcccaaaaggacctaacttcagaagaagattgtgctgagcgttgggcaaagatttctgaagatgcgttattgtcgctatttgatgaatatcaatagcaggtgaaaagttatctcgactttatgtcaagattcaatattaaatattgattattttatatcttttatatagtttctccttcgataacgaagttaatacataaactaagtcttattacataccaaccatccctgattgttgtataggttattacattgagatacagaacggtacgtataaacagttcttggaactacgttcataattagtgctgacacttggtacttgaccactgtatcgtggataataatatcaaaatggtgtttattattatctatggtcaagtgtactacggtagtatatttacgcgagaattactattaaaaaaccgacatggcatccatgctaggagaacagagtgtcttaacctgtgttttacaaatgaaacaaattccaataaaaattttttccattttaaaacatgtatacaatactaacaatcaaaataaattcttattttccctcctttcgaattttctgttaacagttaatcaattccaaatttatttattaagaaaatgtcagatcaaaactctaaagcatttactaatgctgaattagaagcagaagtcttattattaaaaaaaaaaagctgctaaaattgctaatataaaaatttcatcattagaagaagattttaaaattgttgatgcaaaaatcttatcattaaaaactgctaacgatgaatcagaagcaaaaatttcatcattagagaaaatccttaaagaattaacagttgacagccatggttacgattcaaaattagttacaaaattagtttctaatgaatataagatcacatctatgaaagatgaaaccaaaatccttttaaatgaagaaagtgttgaagctgatattgctagatatcctattgttgaacgtattaataaccgtattcacattactgactcaataacaacaagttatgattttttccgattttattttacattaaaagaagcttttactggtttaggttacattaatgaattcgaagatttcgaagatggtaacgttaataagctggcaagtactatttgttctaaaattttaggaaatttatttactacatttatttcaaaaagtgtctcagaggatacctatgaaaatatttcaactaaagacggtacctttgcacctcatttacatggatttcaaatgttagacaatcttttaacaaatgttgttggtgagagagatgaagaaatcaatccattagatgcattgagtaaggttaggtttggtgttaatttcgataatactgctgccctaaaaattgtagttagaaacttaaagttgatcatgaaaatatatgaaactacagaagaattaaatgagcatgctataatgagacaattagcaaacaacatcccatacgatattcaacaggaaataacctatttagcaaagcaaaaacgaggagatccactagaaaagaaaatcttttcgtcaaatttcacaaccttagaaaagttgtacgaatatcttgatttatggacgaaggaaaataaggtaaccaagaatgaattagaaaatatcattccacccgttactgttgcaaaaatgcacggtatcaaaaaggattcaccacaaaaaacggatgaaccacaacttgcagaatacagcaagccccctacaaaattaagttttaacttaatctcgatttcacatattaacaataattaaaacgtttttttctgctgatatattatgacaaggtcatatggatgtaattcaattttttgatatttacaatgaaagatatattattcgtattaccactagcaagaaaaatgaattaaagaagatatttatgctgatgaaagattgaacatgatgtttaatagggaaaaccagacgagcagaagccgtcgaaggctcaatagaaccttatctaactaataatttatccgatcgattctacacagacatctatcagattactggtcatttactaagaatgtacattatttatactcaaatttgatattattcaagaaatttattttaacagcacactgcattgaatatttaacaacatccgcatacacaataacatacaatagtataactgaaggggtgaatgtttaagtattttgaaagaagtttgaacaagattaattaattcatcaattaagagggtgagtgtttacatagcttaaaaagagttaaccaaaagttaatcaactcattaattaagagggtgaattgaataatccaacaagatgttagaacaaagtttgttaattcatcaatttaactgtatttcaaagatacattaatcaaaagttaatcaattcaacgctacaacaataaatattttggagtcaagaacaaagtttaatcaattcaacgcttccataatgaatatttagaaactaatctaaaattatacttgatgtaggaaacaaataatgattatgatagtatacaaaatctatatccacaaataattcaacatgaaaatgtaccaagatgaactgatgagaatgaagaccatcattacacatatgaggtggatactgttacgaataaaatatgttatgaagattaaaaccaaacaaaatgagaaagttgaatttcccattaaatgagcaattagatgacgataatagaatctaataatctataccagaagatccaagatgagagtagatcactacctgtgagaaagcaatgtttaaggataaaactggtgatgaaatattaaaacccatttagaaattataaggtaaacctccatgtccggaactcaaggtgttgatgatccaatgagtgtgtcaatgccaaataataagaaaagatgctaaagtaaatgatttcaacttgtcaaatgatttttcggaagatatttcaccatcactttccaccagcttatcatctgttgatataactattaaaaatttaccatcgcatcaaattaacttaggcaaaagtttaacgctgttcatccagcaaccccggtgcaaaaattaccacgtctatgacaaagtaggcagaggctgacacaccatcaacttttcctcttgaaacaactacaactgatttatgtcaaaagaaggcctgttctccaaaatcaaacatcacacccttcatatagattcaatggcacatatcaaaggtcattgatccgcccttcaaccaaaggggaaaatcaagttgcacgtcgattcaataaatctataaagacaacaacaaaaacaacttagttcatcaaaaggaagtgatgttcccgttggtaacttaagtgttcgtaaggaaatttaatcaccaaataacaaaataataccagatttagaagaagattggttaaggaatcaccagtttctatattattatcaagtaatgaaataacttacgaagactatcgagaagaaactacaagggaatgagaacgtttcattcaacttggaaaaaatgtgcttctttattcaactatttaaatcaacccgtttcatctgaaccattgcccagtcaacacctactgtcccatcagatgatcaaactaaacgaaactcaaagaaaaactaaaatatattaataaaattaataaatcaaaacaccaaaattaaaacttacaagcctttaaggcagatgtcataatgcaagcaattccaaatttgttcatatagattgatctaatttttataaatcaacttacaactaaattacctataaatgctaagaaaaattccataaaatttatacacttaataaattaatcagattcaaaatcatgatgcaaacaattacaattgtgtcaaatttcattgaaggtaaaagaaatctggaatttaaattaaccaatcagctataagatataatacatatcaaaagggtattcaatttaagcaccaatgatggttataaagctagaatggtaacttagggtgacttataatcaataaataattaatcacaactatattcacaatttacatcctgattttgatcagagtataatcgcacatacatgtcattccaattttatttaaatcaatatgaactcaaaactgcatacttcagcagtaacttagaaggatatatttatatttattacctcatatggccgttatttaccaaatgtaggtacaaacaagagggtgatatacaagttacagagatgtttcagtcatttgaagctatctggtatcctaaagaatttagaaatttcaaataaattgaacaactaaaattattaaggacatgaagtttttccatttacactaatcaagttattaggggttaaactgttgcaatatttagaatatttactgataatatgattataatcacttgaaataggatatcgatggtagaattaaatcaatatttaaagatttgtatactctcaaggaaatcatttcagacgaaaacaaaatgcaaagatttacaaccactaatttatatgttacaagaacaaaagaaaggaagacataatcaatcttgaattaatcaaattagaatacattgacccagctaaagacgataataatatccaatggaagtcaagtgtaataactccaaatgattactattttaagtactacaatatcagaaactgatctattcagtgataacaaagtcctctccaactctaacccggaattcataaagcaaattaactactaaacatacctgatatgacaagaccagatataaaatacgtagtaaattaattgactcaattttgtaagaatacacacatttaaattcactcaagatgaacaggaacagttttgaatacttgtttaatacaaggtcataattattagaattagcaaggtgatacaatgctcatattctatacacacagatctctagaatgttaacactagaatatctgtaaatgtatatttggttcaaattatatggtaataaagtcaattcaaaataaaacattagtattttcagattcaaccaatgccgaacttgatacaagtgcatcagattgcatgtaggatttgaccactaattatattttaaacatggaatagaaaacaaatacttatatcaactgatagttgaaccgattatctaagaaccaaatcattattccaactacaacttaaatcataattcatattactttgcatgtatataacatacagctaaagaaagaatttaattaccagatccaaataatacattcagtgataaaatactatattcaaatcaattcatatcgtcaaagaaaaataatcaacaaataattttaaccaaacaagttatagttaaattatcaaatgatttgatttctactatcttttgattctgtcaagacaggtagaatcaagagggtgtgtcgctatttgatgaatatcaatagcaggtgaaaagttatctcgactttatgtcaagattcaatattaaatattgattattttatatcttttatatagtttctccttcgataacgaagttaatacataaactaagtcttattacataccaaccatccctgattgttgtataggttattacattgagatacagaacaggtacgtataaacagttcttggaactacgttcataattagtgctgacacttggtacttgaccactgtatcgtggataataatatcaaaatggtgtttattattatctatggtcaagtgtactacggtagtatatttacgcgagaattactattaaaaaaccgacagttattgacatgtaaaaatttcacttcgctattaaggttagtattttctatgaatctctttcttttgacaaaggatgcaaagtggcaataacagcagagagaaacaagtttacaataatttaaagaataaatatattggtattggagatgcagatacaaagaggggagaatttttaagtaatattaagaaagatacatattttagtttgattagttatgattcaataaatacacatttaagtattgggttaaataaaccaaaacaacttatacaaaatgatataattgataaaatgagaaaatgttagataataaaagtaagataaaataaggataaataattaaataattaaataatcaattaagctaatagaggagcttgatcatttgaaattgcattattattattattattttcaacttgtcttagagcagtattaaacattgataaaattgaaaatactaaatttaaacctgcgataataaaggcgaaaatccattgtaaagcaaacattttgataaacatttgacctaaaccaacacctaacattaagaaacttgttgctaaaccaacagaccaatcagaatagaaaattaataatgacattggtacaagtaagaattcccaaatgaaaatatttgctaatattctaggtaataaagatttattatgagaatgaaataaacaagcaccattccaaaaaatagcatataaagtccaagataatggtataccagtaacaggtaaatgaatagttaaccaatcaggtaatgatttaattgaaattgttttatgagagaaatataatgttaataaattaagtaaattaataaataataaaatttcagcaattataaatttttcagctgtaaagaaataaatccaaaagaaattaattatatttgaaattgtaaaatgaggaccaacaattgcaattacatttgattgatttgaatttgaaacatttgaattaaataggacttttgttataaataaaaattgtaataataaagtaattaaccaaaaaattgttgttgtaaataaagtaccagagaatggagttacaaaatgtttatcattttgatgaggtaaaagccaaaatatggttgcaattgcagaaattgcaaatgatgcagtaattgtgatttttgaagctgttaaacctgatgacattatttaatggaaatacttataaaaagaagaggtattttaagaaaataataattaagaataaagagtaataataatcatgataatatatattttatataaccagtccacttatcattgatctgatattgatattgtttatgatggttatatgttaaatggattatagtccttacctgtcccatgtgtctgaagtccttattctaaaaaaaaaattttgaatgtgtatcacgtgaaattatgtaataataaacgatcaacaagtactacactacataatctcatatcatatcatatcataccttatcttatcggtgtagtaccttctatatatcaaagattatactctatactctatactctatactctataactttactctaatatactctactaaacttatatccgttactatgttaatacactatagataagataagataagataagataagataagagattacgtaacactcttctggaatattctagtagtctattaagtaatatcggatatcggatatagtgatatccgatattaatagtatcggatttaaatttaaatttaaatttttttaagggttttaaagttatttccatctgaaaattcggactttaacctattaataatctaaacgatgagtaattaaatttttcttttagagattacaaatactttttttagttataaatactgatctatttcctatttcctcgtataactttattattctcttctcctctcttctctattctattctattatcaaaaaacaaatgagagctttaagaaataccactaatataagaaaagatttattacaatgtgttaattgtacaaataatattaaccctgattataatgatgatcgtatatttaataaaattatacgaaataatgataataactctaacacaaattcttatatactacattataataacttatctcaagcaaatatcgatagaatgaaaaattatttaggtagaactccttcaatgaataatacttttcattttatcagatagatatacatattactactagctcatatcacctatactaaaaaaaaattacaaaactaatactggattattagtatttattatacaaacatacatacatccttaattaaggactaatactaaggcatatgtcggttcatttttgaaacttgctcgtttaatggcattatgtacaagatattattgtgaaagataaataaataaataaaaaatagtatacaattataacataataataataagaataataataatactatattagaaatagaaaaaaaaatgtgtggttttataacatattggaatattgtatattgtataatgcagatatttataatataattaactaactaatatattaatataattaactaaattaatcctttttttcaactttttcttcagttgattcttcttcaatttttggaatttcaatttctccatgattattcatccaatctttaaatgatcctaaataatttaatctattttcataaccaaatgtaccagctaattcttcactcattgttgatctaacacctgcaagacaataaaatattaatgttttatcagtacttggtttatcaaatccaaatgacagtttaaattcatcaggatgtaaacctaatgctcctggacttgatttacatggaatattaattgcatttggtatatgacctgcattaaattcatcattctctctaacatcaactataacatatttatttgaatcaaaatttttaacaatttcattcattttaataaaatcaataattggtgcattagattcgttttcaataactgaatattgtctcttgttattaataatttgatttggaattgataattttgtagttttaattgatgataataatgataatctattagttttaattaaattacgtgataagatagaaaatgaacgtgcaattggtgcagttctaataaactttaatggtgctcttaatgacattggtgttgttaatatttataatttataaatcaagagataaataaacaccttttgccacccttagtgttaaaatattaattgttaattttaaaagctccatcatttttcaaaaaataaaatttttcttgtcgctcgtatttattattattatgatctcataatattatcaattttcactaattatactttatatcactaaatcaaataaaattattattaacttaaaaatgttatacttattattattataattataattataaactatatatatactgtatttacataccaaactgttttctcatttgatctgccatttgtctaaatgatggattttgcatcattttttgcatgtcttgcattgatggcataccacccataccacccatacctggcataccacccataccacccatcatcttttgaatattttccatcatatcaggattttgttgcatttgttgcattgccttttgaaattgtggttgttgcattttatctgccataccaggtggtaaatttgattgcatatttttagttgtttgtgccattcttgcaaacatatttctttgtaataaaactgcttcaacttcagttacagttgtacctgaacctcttgcaactctaataattctacttggttcatcaataaatatactaccatcactctctaattcctttttagtcattgaatccattatacaaatcattctcttaaatctatttgatgtttcctcttctccaacttgattcatcatttctccaataccacctggtaacatttgtgctattttacttaatggtcccatctttaatatattattcatttgtgattgtaaatcttttaatgtaaatttaccttcttggaaattcttcatactatctccttgatctaaatttaaagttttaacatgttccattaatccttgaatatctccaatacctaataatttacttataaattgttttgctgtaaaactttctaaatcattaatatgttcacctgtaccaatgaaaataattggtgtattacttgatgcaactgctgatatagctccaccaccttttgcatgaccatccattttagttaaaattattgcaccaaaattacttgattctttaaatgcttttgcttgtgcttccgctgcttgaccaatagatgcatctaataccataattgtttgatttggtttaacaacttcaccaatttcaaccatttctttaaataattcttcctcttgtctatgtctacctgatgtatcaactataataatttcaaatttttccttcttaaatttttcaacaccctcttgtgcaactttaactggatcactctcagtatatgaaccaaaatatggtattctagcctttgttgcattttgctttaattgatcaaatgcaccagctctgaaagtatccgcacaaaccataccaactttaaatcctcttctttgataataaactgctaatttagtacatgttgttgtcttacctgaaccttgtaaaccaacaaacataataacatttgattgttttttacgtggtttgaaaatttcgacatttttaacatcaattaaatcacataattcatcgaaaactgccttttgaattagtttctttctattggttatattatcactttctttaacttctaatgttgcctttaatttctttcttaatttcaaaactaatttgatatcaacatcactctccattaacgcatttgaaatttcctttaataatgtatcaactacactttgtgtaactgttgatgatttagtagcctcagagacggcattgttaatacgtctacccaaatctgctaaaaccatccttactttgccaaaagaagaaataaaagttccatacttaatatcccaccagaacacacaatcatgaaaattcaacgtaacttatcaccatcaccaaaaaaaatagcatttttctatatccgtccaatcgtcgctttagtaaatggtacattatccactgtatgaacactcttttacccatgtctgtaaggataatacaaccaccatcaattgtggaattctgtatatttaatcctcaatggattgatcaaaggaaagcggaagattcaagttctttaattcaacaagttatttgtcatttaaccaaaaatgaatcaggtgaattagttagtgatattaatgataatgttgatgaaattgtaaatgcaattggtgtcattactgcaatttacaatatttcaaatcaattgaaaagtggtaatgatgataatattgattatacatttatagatactgataagtcaagaactattgttgttctattaaataataattattattatttcattaaatttcaatttgctattaaatctgttgatgacaattctgataatcatgaatatacatcaattggattagcatctgatgaatatttgaaaaaaatgttattggatgcttatgatttatttacacttaatcatggtgagtttgatattgatctaacaaatgttaatgataaaaataatttaagacaattaacaactcaatggtggaaaatttggttaactaataaatttgagataccgtcatcttttgatttatctgatgatggtaactttaaattgatcaatgcattacgttattcatctgtaaggaaacctgttggatttactgataatattgatttaaaatttcaaaatactattttggagaatgaatttcttgatgatataattgtgataaatactaattggtctccagagaaaagttggggagtaatatataataatattgaacgttccaaatacaaaaagtcaagtatattcaagttaattacaatgtttaaaaattttgatatgtcattaggtttaagtacttatgcattaacatttggtaattggccatcgctattaaaatacattgattcattaagaaggtttgattcaattaaacctgatggatcattgattgaaagatctattttcaatccaagctattcattgattaataatgtttataatccatttgaaggattaaatgaaactattaattcatatttaccaacagtttcaactttccaaaatatgacaagttatgttaaaccatcattattgactgtttctgatataacattgcatccatggaatactgttacatcatactggaaaaaagatagtgagaatattgttaatggagaaaatacaccagttgaagagaataattcacaacatcataatggtggtattaatttggttaatgaagataagtgatgatagtagttgtgatgataatggtaaatacaatagaaatggtgcttatctattgggtgataataatggaaccattacattacatgattattatttacaatctaaatctactaataaatatgaaaaaatgaatcctataatttatgaaatcaatggtatgttattcatctatatctataaaccaacagatcaatctatcacaggaatcattttatgataaattatcaaaacaaatagattccatatatgatacatattttgcagatttaataaataatcaacttgtttcaataaagaaagatttaacaactgattttacatatttaatatacgatgatggtaaatattggagttccatcgatacaattccaccagatacgtctacattaatatatcagttaccgatgagtagatacattagagaggaacaaaatatatcagttctggagactacacgtatattatcattgattcaaaataaacgtataggagatttactattatcaaataatgatgaaaataatgaaatttatgaaaaagtagtcaaactaaatcaagaacaatggtgtatgatacgtcgatacaatgctaagaaatgggttttactaatacgtaattccaaacctggagatattgatatattcggtggtgatgtagctaaatggcttgaatgggtagcaaacgatggttaccttaattaagggagaacgcggtttaagaacataatttcttttctgttaggtagttttagttaaggaatttattttttttaataacccattttaaagggtgtttattcctttttgatacagtgtaaataattgtataatatagacaacaaacaactaatacaaatatggcagctggactagtatgtaaacaatgtgggggtactacattctcaagagagtttcatactgcgtcaggagatttagcatgtacgagttgtggtacagttatggaagaaaatccaattgtttcagaagttacatttgcagagaatgcagcaggtgcagcaacagttcaaggttcatatgttagtaatgatcagagtcatgcaacttttggtaatggtagaggttcattagaatcaagggaacaaactattcaaaatggtaaacgtagaattcgtaatgttgcattatcattaaatatacctgatcatgtatctgatagtgctcatcaatggtttaaattagctttaacaaataattttgttcaaggtagaagaagtcaaaatgttattgctgcatgtttatatattgcatgtagaaaatataacactcatcatatgttaatagatttttcatcaagattacaagttagtgtatttgcaattggtgcaacatttcttaaaatggttaaagcattacatataactgatttaccattagttgatccatcattatttatacaacattttgcagaaaaattagattttggtaaaaagacacgtaaagttgttgaagatgcaaaaaaattagctagaagaatgtcaaatgattggattcatgaaggtagaagacctgcaagtattgcaggtgcatgtttattattagcagctagaatgaataattttaggagaacacacttagaaattgttgcagttacacatattagttcacaaactttagagaatagaattagagaatttaaaaagacaaaatcatcaaatttaacaattaatgaattaagatctaataaagaagttgaaaatgttttaccgccaagttatcagaaaggtttagttaaatcacaaaaagttttaaatgaattaaatgaattagataatgttgaagataaaatgattaatgatccagttttaggtgcattattagaggatagtgaaattaatgaagatgaaattcaaagtataattaaaaaattaatgagtagaaagaagagtgaattagtgaggaatgttaatcaaaaagttatttatcaagatggtataaataagttagagattgataataatgatgatttaaatttagaatcatttaagatggaaaataatttaaaattaaattatgaaacattgaatgatacaagagatttagttcaacaaaaggatagtgaattgttgaaaatgattgaaaggaataaaccaagaaatttatcagtttcattaccaactactgaagaaattttgaaaaaaatacctgatgatgatgatgaattaaataaattaattgatgatgaagaattagatatgtttatattaagtaaggaagaaagtgaaatgaaggaaagattatgggttggatcaaatcaagatttcttacttgaacaagaacagaaaagacttaaacttgaaagtgataaaattgcaggacatacaacacaaacacgtaaacgtcgaaagagaggtgagactgaaaataatgaagataataatttaccagttggtggaggtttggctaatttaatgagagcaacattaagtggtaattcaactgcaactgataatgctaaagctttattaaatagtaaaacattgagtaaaaagattaattataatgcagttaataatttatttgatgattaaaggaaaatcaatagctattaaaactgaagtgaaatatgtatgttataaaaaattgtatagtaataataataaatagttgaaaataaaacgaagaaaaaaagtttcttctataaaggtcttccatttgaaccaactctacctaaaccattacattgagagcaacgttctaaatctaagaagaaatgaactaaaccacgacctttacaacgagggacataaaacaccaccaattcttggatcaccgggattaacaaccactggagcttgttgtatttgttgagggaatggattataaggtatagttgctcttgcaccctctggtaatttaacaacatttgaacgtattggtataggttttggtttatgagttgctaaatattctaattctttttgatttttaggtggatttttattttgaggacggaattttttccaacatgatttacaatatgtaccatcttttttcctaaatcccgtattttcacattttttacaattataatttgaaggatatcgccaaggtaaataaggattaggattaattggggttggtttaggtaaatttaattgttgagaatttgaagatccttgatgatttggtggtggaatattaggtcttgaatatgaattttcctttgatggtatactttgtggaggtctattttgagatggtggtgaaccttgaggtctctgaggaggtaatggagtatcagggatagttggatcagcaattgcgtcatcataagatgggggaggttcattagggcacattttcattaggatcataaaattccttcattgtttaattgtgtaatggaaggaatagagtgtagtatcaaaatgattaaaatgaatttgatcaaagtcatataatattaaagaggcttaacctttttttaaagaaaatttaaattttcatgcagtgcgagaaaggaaggttcttattacactgatttatgttgtggttggttgttcatgtgggttgtatttgttttatttggaagtatttagtagatttagaaggtattgactgtatgttaaggttatggagttatcatagtatgagattatgctttttatatgacattttacgggactttttaaaaatttgtagtattttaccatttttaaatgagaattaaccttaataattcaaaaaatttacaaagttaaaaattattgaaattctcttttctacaatttaaacaaaacagtgtgtgcttatacagcaactaaacacagtcatcattccttacagtaatatatacataataaacaccatataaacatcacaaaacaaacatccataatataaataaaacctgcaataaaacgccatttcccactataaagacatcatcgcgttgctctttattttaaatcattttattttattttatagtgtgagagaaatttggattaatatgttggttaagtattgcatttctttgaatcttttcatcttttcatcggtttttaagctttatctgttcatatctctctataccgacactagcacatcaatatcacatctattagaaaatgttatggcttactcaaacccagaaaatgggtgtatttttttcatctgctggtgctttcctctttatattaggaataatgtcattctttgattctgctttactttcaatggctaatatactatttttagttggtattgcattattaattggtcctcaaagaactttatatttcttttcacgtcgacagaaaataagaggttcaattatgtttgcattggggatattattaatttttttaaaacatccttttattggatttatatttgaaatgtttggtatgttagcgttatttggtgaattcttcgcaacaatggtacaatttttaagatctgtaccaataataggtcctttcttatcaaatccaatggttgctccaattgttgataaaattgcaggtattagagtcttaccaatttaattgtataatgaaaattttattataatatattctattattactattataattctattatatttaattctatttacaaaatattatttacaagtcttgtgaattctaaaactttataatcttgtccatgctgtccaacaatttgaaatccaaaattttcaaatggtatattcattgttggtaatcctgctaatgacattggtatagtacatacatcattcatatatccttcaactatatccccattaccttcattaattaatttaggtaaattaacacttgttggtacaatcattaaatcaattccattagcattagtcaattgtttcttttccattaaacaatgtttatccctaaatactttattaaactcttcaattaataatcttctaacattacttgccttcttataattattatcatatccatatgaacttaatgaataattacctaataaaattcttctcttaacttcttctccaaatgctttatctctattaaatctaaattctggttcttcaccttcataatcttctgttctaaatccatatctattaccatcatatctagataaattagatgatgcttcacttgttactaatgtataatatgctggtaatgaatacttaactgatggaatagatattggaattatttcaattaatttattttctttcagtttatttaataatttctcccatgattgtttaatatcttcacttaattcatcaaacttatattcaattggtataccaattttaaatttcttaccaacgttcttcttactatttatcctttcaattgcaatttcctctctacaagaatcacttaaactagttggatcctttgaatcagctaaatctaaatgtggaaaatactttccaaatagtatccacttccttcgacataataccaacagtatctaaactttgtgcatatgcaactaacccccatctagaaattctaccatatgttggtttaaatccataaatattattataacatgcaggtaatctaactgatccaccagtatctgatccaattgcaaaatcaactaaatctaatccaactgcagttgctgaacctccacttgatccaccagttattctctgtctggaatctatattattgaatatcaccttacccttttcatctctattcaattttggtacataatattcattaactgtatatccttctttaataccttcaacaatatcacttgatataaattcaccattttcatcacctatatccttagtactgaaaataacttcttcataatctataaataaattttcagtttgtggataaagtgaattcaatgttgggccaaaatatgatgatgtagttgaattacccataccaaattcatccatatttgttttaccaatacattgagatcccgattgatttaataatgttacaacagttgaatcgaatggtgatttataatttgataacattaatgatgaacatgtagtgggttcatttcttgtcgtaaaattatcctttattgcatatgttgtattgaataatggggaaaatgatgcaaactcatcaactggtgtctttgaaggtgcacgtatagatgtgaatatgttatatttcttattaacagccttaatatgtgctagtttagacatattaaacatggtttaaagaatgaatgcatgtagtaaaatagaagcaagatttatgtagacatgaaaaaaatacgacatgaaatatcaacattgacattcaaatctttgattttctctttttgttccaaaatcaatgccaaagaaccaacaacgtgttatacctagactaaaaccggtgccatatacacttacagatgtatcaacaactttaaaacaacctcaattaacacccgctgttgaattaaatcaaataacattatataatacaccagatttaccaaacaataaaagaggtttcaaatatcaaccatgtagaccaaatccttatttacattctaaaatgtattcaacaacagacttaccaccatatggtgttcattggtcatattttgatagatcatcagaaatgtatgttagtgaaaatttactcattgcaggtacattagaggaatttggttggagaagtacaagatcaaatattgcaatacgtgaaggacgttgctatgttgaatataaaattgttaatggaatagatgtgaatagtgaagataacgaaataaatctgaatgatcgtaatgaacagagaactcaaaaacctcatgtacgtataggtttgggtagaagagaaggttcattagaggcacctgtcggattcgatggttattcatacggtattagagatgttaagggagagattgtacatttaagtaagagaactgatattggtggagttgatttatgcgttggtgatataattgggttattgatagaattacctactatggaattacagaaagagatatctaagaaaatgatattacagaaaacattatcagatcctatagatgaagagattaaaaggaaagatttgaaattgttagataatacattaataaataagggtattgaaagagatatgattccaatcaagtataagggagagatgttttttgaggaatatgaatatacagaatctaaagcaatggaacatttacttaatccagtcacagtttttggagagagggctatttcagataaggaaagatttaaaccagctacacttcctggctcatcgatcactttatttgtcaatgggaagaagaaatgtgtaccatttgagaaattatatgcatttttaccacctgctagtgaacaaaagatgacaaagaatgataaaaaaggtaaagcagatttttcaattgatgttgatgatggtagtttaggatattatcctatggtgtcgtcattttgtggaggtgcggtagagataaatagttctaatgatccatggattatgcctgaggatttagaagaacaaataaataatgatgaaatcaagatgtatggaagaaaattcaacgataaagtggcgcaagatattgttgtcgatttaattgatgatgcaataaacaaatatttagatagaaaggaaattgaattagagaattaaaagttaaagaaaataaaaagatatttaatgaaaactaaaaagagtcaaaaagctcaagtttcttatcacaaccagggcagctatcaatattccttgatctttccactaaacctttacaataatcgtgaaatcttacatgacatttactgttaggacatgataaccctcttgttagaatatcaccacaaccgaaacaagttgaaattgtaccatttgggaaaacaccgtatgtttcaattaaatattttctcaactccactaaacctctagttgataatgtataattattattataacgttcaagccaacctgaatattctaaatcttttaaaaattcttcagattcctctaatgaaagtcgtataataggtgcaaccaccgatgtttcaccatcatcaccatcaccttcaggtgtttgttcctcagttttcggttcagttggaccatctcttaaaaatttgatcattctcattaatggaactgaatatgtaataacttgaatttcaggtgttgaattcgcaagaacatgttccgatgcaaagattctgtctataatatgtttaatatattgaatttcattatctgtatatcttgttgataatagtatagcaccattaggttttttattaacaaacgagaataaagtaactgatgaatcatccatatcctttgattcaacaatttcaaaatcaagtggatccagtttggaatttattttagctaatacagatttaaattgtgtgctagttacgttaatatcatctatcacatcaacaggtacaccattttgatctgcatatagtgtacgaatagctttttcaaggtaatcgtgtagtgatttactagaaatcgttcgaagagagatgaccaaatcaagtaaagcggaatgtattggggtgtatgcatcagaagatgtcacttgtatcacataatctgctaccgacattgttgcagtgtggtaatgatctatctatacctatatacctatacaaacttttcaaaagaagtggtgtaacagtaattggacgtgtattatatatccacgacgcgaaattttgttgtaattttgacaaatttgaaaaatcatgtctttgcttattatggcattgaggaattgttttaactgtcatttgatttgattacttttgataaaggggaattgcacattaggaactaactacggacatgtcatattatcaaatgcaccagaatgctaaccaagggtttaaccaagggtatgaacaacctacattcaatcagggaggaatgggtggatacccatcaagtttaccaacaggttcaatggcagacccaaattctgatccatcaatgcaaacattaccgaagggactacttgccgcattatcacctgcaggatatcccggtgaaccaccattattagaagaacttggtgttaatttttcacatattgttgcaaagacacaagcagttctgggactgcgtcgtagtccattagctgatgatgttgttagagatagtgatttagcaggtcctttattattttgtatattatttggttcacttttattattaagtgggaaaactcattttggttatatctacggtgttgcattagttggtacagtttcattacatgcattatttcgtttaatgggatcaggagatgttgatttcttaagaactgcaagtgttgttggttattgtttattaccgttagttatattatctgcaattgcagttttgaaaaatcttgataatttctttggttatatattagctgttgcaagtgttggttggtgtacatttgctgcaagtggattctttattagagttttgaatttatcaaatgctagacctttagttgcttatccattagcaatgttttattcagtatttgcacttatgacaatatttgctgaaaagaaagtttaataaaattatattaatagttatagaaaataatacagaactctaacaaacaattaaatcatttatttaattcactgtgtaaactaggaacgaccaattcataatctgtcgtattactacgataatcatcacttacattttcaatatgtaatgtagcaataattccatcatcttctaacaaataacccaaatcagcattagtttcttcatattctttaacattagattcagaagttactgttgctctttttaaaacaggaccagctaagtaatatttatcattaccaccaacatttccatatctttcattataatctttctctgttaaatttttaattggaattaaatcagaataattacgtttattcatgaacatttcatgctcacgtttctcaccagtacccggttcagatttaaacattggaatcatgtcttccattacagttttagaaaatctatgctttttagctctcattgataaaaatttaaccattccatcagggggtggtgcattaacaattgcagatgagatgaaattagttataaaacttggatcattttcaggtttaattggtttctttgatctaattcttgaaacacatgataaatgaacatctcctgataatatggtaattctaacattattttgtttggaaattgatattaatttatctaataattgatttctttctcttttatgatgagtggcacaccaatgatcatttaaatcatccaatagttcaacttcaccatcaaattcattaactaaacctttattaatgacaccttttcttgcaagccataaaattggcttaataagtggagtttccataattttttcaatgaaaaccattcttggatacataataggaacacctaagagaacaattaaatgtttaatatcactatccaattcagattgaagacgttggaaaactaattgataagtttcttttgataaaacttcatgttttgtacgttccgctctacaatccaaccctacaaatgcaattgatttacctaaccttgcaaatatagatcttgaatattgtttaatatatggaccttttttataacctaaaatatatgatggatcaatattttcttttgtttcagtttcaatattagtatgttgttgaaataacatataatatttataagcatgttgaccaactgattgaaaaatttcttgtctcattgtaatatcactataagatccaaatccatcaattatatcatgatcatcaagaatattaatttgaggaattgaagcaagtgcaactggtaaaattgattgaattgtttgaccacttgtaccaatccaataacctttaccaaaccattcgatatatctattaagataaaatttatcaaatgatttttctaattcaggtgtcattttatcatttgaatgaatatgtttatgtttaagccagttactaaacatttttgaagtatttttaatattatcagcataaatttgatcaccacctccaatcattacatgataatgataattagttgaatgtttacgaattacatctaaccataatgaacctttaaaagtacttgtttcagtccctaatgaaaatccattacatgaatgagacattatattcattgattgatcatttgaaggtatgaaaaattgataatgtggtaaagttgcattatttaagtaatatttaactttttgttcataatcctttaattcaaattcaaatgaaaatctaataaatgtgaaacattcctcttgatagaaaatctcagattttgttggtcgtacatgataaaattctccatttctagtatccttagttgcaggaccaattataaatttcagttgaggaatttcattattaaataaatctctaataacaaacataacactaccacgataattatttgacttattttcatgagatgctaagaatctaacagttggaccacaactaatcgatagttcttgtaatatgtaatcatttggacatgcatcctcagtagggattttatcaggatctgcgcttttaacattttcagtgtattcatccaatggaagagaatcaaaccaattatcttctatttccatttccctttccctttctactgccattgatatatactctatacttgattggcttaatgaaactagcagaataaggaaccaaacccagcacagaataaagaataaacaacttcttccctacagcacagcccaagtgaaatgaaaaatttatttatttagaaatctctcgataagaagataatttgtaagcagtgggagtactctgaagtatataaaggtatagcagaaggcatatgcacatagtatccttagagagtcatgagctgcgtgtaaatatatatatatccatatatatctctacacctatgtgctggaaaagagagaaaggatagagattacaaaaaagacttgttcttgattattatattagaaacaaaaatcatttccaaaaactgtacatgttcttaactgttagaatttggcggattttcgctggacattcaagcgtatagattaattaattaagtaatataaaatgtatgaataacaataaatagtataaaagacaacaagatcaaccaggaaacttatttatctaatatgttgtatatgtacttaacccttctgaattcgactcaataaacagatattaatcccttaccaagataacttaatgaatagttgttcaataaacaaagtaaaataaatataatcttgaaggcaaaataacacataacaacacacatagtaaatattcagcagcttcacgaacgtcaacggatttacgcaccattgggatttctgtgtctccactctcattggacgatcacagaaaccagagaattaccatcgggcttatgtcagattccttccgataatcataactgtattatacactataatacctctcttcggcttactgaataaccggcaacttcatataatgtatctctagcatattgaatacacgctcacgaccgtagtcctgaactattgatgtagtcacttcagttcttccaagtcaatgtgaaatccaaagaataattccttgcttattataataataatataatttaataatgcactaacataatgattctcttctctaataatgtaatcttctactgacctaataatgtaataattcttcttctaagataattgatccgataacgaaaccctgaggtaatccttaccgattgcaccaattatatgatagtgtcccatgtattgtattataattcaatgtaattgatccgataacgaaactatgaagtactccctatcgattgcaccaattatgatataatgatccttattaacaagccatcacatatatccggttatgattgacgcgacttcccgtgttgaatatatttgacataaaccttaacattaacaccgtcaaactgaaatttgatcttttacatcctaaattcctatactttcttttatttcttttactttattcttacattccagtcttttttcttcatctttacaacaatgtcacagaaagtagttaaaggtaccattctttgtttacacggttttgcacaaaacggtccaggtttctcagttaaagcatcaggtattagaaaagctttaaagaaagcaggttatcatacagttttcattgatggaccaattgaacttacagcagcagatttaccatttgcagcaaattcattaggtgctgatgataaagctgaaaaaccagattatcgtggatgggtatatacacaagctgaaaaatttgacattcaacctgcatatgatgctattaaaaaggcatatgttgaaaatggtccatttattggtatcttaggtttctctcaaggttcaggtattgtaggtactatacttaatacttttaatgaagttgttggtgatgataaagctttagaatcacttaaatttgcaattctttattcaggttttaaatttgaaaatgaatcagttcaaaaatattatgaaaagagaatttcattaccaacattacatgttattggtgaacttgacactcttgtctctaatgaaagatcccaattattggctgatttatgtgatgatgctacagttcttaaacatccaggtggacattattgtccaagtactaaggatcttcttaagaccgaagtcgcatgggttaatagtgttgtagatggtactcgtgaagaatctaaggaaaccaatgcaaatgaagcatcaaagaaagaaattgatgatcttgtatcttctatggataatcttggtaaagcatagttttatagagtttatatcctataacattaatatagacttaatagagacaccaccgtatatacacaataaaagaattaaactcgctcttctccgggaacattctttgatgcatgatatcttatcaaaaaattcatttttgcaataactttactattttttttactattctttcttcgacacgttcttctctttgaaacagtatctatacttgttttagaacaatggcatctgaaacaacacctcttgtagctacttcttctcatagctctcatttaccatctttgaatttgagaattgctcaagttggatgtgcaatgttatggtgtttatttgcagcaggtcccgtttttggatttgctgctttaaaacctgttcttgtagctcaaggtgtttatagtgaagtatgtgatatcaatactttaaatgaagtttgtatagaacaagatttgaaattaaataaaatgtttacaatggctgcagttgtcactaatgcaactgcacttatagttggttcaattttagataattttggtccaaaaattacaggtataattggttctttcgttattgcaattgccgcttttctattatcacagggtgcatcaattaccatatttgatgcatatttaattggttatgtcacattagcttttggtggtccatttgttttcattagttgtttccaattagcaaattcattccctggaaattcaggtttaattttagcattacttacaggttgctttgatacttcatctgcattattccttttctacagaattgtcttccaaaataattatatcccaaatcttacattaaataaatttttcaaattctatttaattgttccagttttcatcttcctttgtcaaatatttataatgcctcatgaatcttataaaactattgaagatattgctaaaatcagtgaaactggtttagatgaatcaggtgttccattagatcctgaagatacaagatactcatcaaatgaagttttatcagttacacgttcaagatcacgtcgtggatcaatcaaatcaactaaatctgtttttgaagaaattgctgatactagattaaagaaaatttcaggtggtattttcggggttttacattcaaaaccaatgattgaacaatttaaatctccttggtggtattttatgtgtttatttacaacaattcaaatgttaagaattaattattttgttgcaacaattgcatctcaaatgacatattattttgatgatgttatttctatccaattgaataaattttttgatattgcattaccattaggtggtattatatctatacccttcattggattaattttggataacttacatacttatgctgttttatgtattcttctctgtgtttcaactgcaattggtgtttttggaatgatttcaatccaattcttacaatatttaggtataattttattagtgctatacagaccattctattatactgcagtttcagattattgtgttaaagttttcggatatactacatttggaacagtttacggtgctattatttgctttagtggtatgatgaaccttttacaaacttatcttgataatgctacacattttacattcaataacaatccaactccagttaatggaactcttgtttcattaacattaatttttggtattggcatgttaattttcattaaatcacaagagaaggaaatcatccgtcataatattattgaagagaccttggcagatgaggatgatgatcaaatacaaacattctcacctcctaattaagtatattttctataaacactctctataacaactaaaataactcttcttatcaagaaccaatccttatcgtaaaaactgattacgcaatctcatcaaaaaataattttgagaggcaaaaggcttaaagcttggtttacgatgagaaagacttctatggctcaagtataaagatacattgtaaatacatttttatttcaaataagagttgaaatacaccaagtagatgacatcggtttttacgtcaacaatacaatcaaatatattatcgttaatactatcacgattgccacttcatccacttgatataccacaacaatcatctctaacatttaaaggtaataatggtccatcattacatttatctgatgtttcattagatatagaaaaactgcaatcacaatatttaccacctaaaagtccaataaatatacgacatgcaatggttggctcattagatataatcataaatacaacgggtatcaaaattaatgtcaaagatataacgtgtgttattaatcctaaagtaatggaaaattggcaattcttagatccatctaatagtgtacttttgaaaagttttgaagatcccatggaaggtttagaaggtgtaatggaaagtgttattgggtttgttgatgccgttagcggtgtcaactcatttataatgtcaaatgatgatgatgtaatagatgatgatgatgatgatgatgatatagggaaaagtaatgcagaacaatcaattaagaatatattaaacaatgataaggatatgagtgaagaattagagaaaagtataaattcatcaagtaaatcctcaaaatcttcattagtcaattatgctatggaatatattatgagtaagatatctgttacaatagagaatgtaaatgttaaattacttgcagatcctattgcattgaattttaatattaataaaattatagcatcaggagcaaaagtagaaaaaaaatgtgaaatccttggtctttctctgtttttattaagtccggagattcaagctgactattatgtggataatagtgatcaaaataataataatgcaacaaacaacgaagaaaatgttgaaagttctgataacgaaagtgaatataatgatgaagttatggcatcttcatttatggctacaggtaaagaagatatggaacgttccatattagaaggggcgatgtattctgcatccggtaaaagtatttatatgagtgctttaaattcaccaattccagaagaaactattgatgaagagattaaagaagaaaaacagatagggacaatgctggcatacattaaatcgattaatctattgttagttgaaaggaagaatttatctatggaattcgatgatatttgtctgacttttgttccaattccaaatcttgcatctgcattcattacatttttaatagagatgagtaaacaaaaattagttgcttcaccacaggaacttaatttcaccaagaaacaaacatcttcaaattctacaaattccaatatcaaactcgaattatttacaataactggagtttatgctagtttaaactctcttttagacagcaatggagaattcattcatggtaaagatataataaagatgcatttaatcaattttttacttgaacagaaaagttccactttatttcaaggatctttagaaacattgaaaattacaaatgatgataataactgcttttattttgatagcacaacaaatgatagtcatgatataaaatttgaaattcaaaagagtggaactacacatagctccacgcttgtttttagtaaaactcttgttcttgacgttaagtataatatagttgaaacggctaccgatttcaaaaataaattgaatactttttgggaaaaattatcacagttaagaaagattaatttgaaaaaaaataaaaggagttataagaacaaattcaacagttctagtaccaataacaattttgatgtatcttttaaaactcaaaatattaaaggtaatattggattatcgttaaacccacaagaatattttgagttcaagatatcaccagttatttatgattctttcaagaaacttttcaagcttgattacattgaaactagaataagcacattttcaggttttacgaaccttaatttcttaagtttgggatatatcggtagtgtgggtaatatattggataggtttcgtggttatgatacaagctctcaaaaatcaactatctacaacacgagaaatacattttcaatagataaaattaattttaatacttcatacgattcattgaaagcagtaataaagttggttaatgacatgaaatcaaagattttgactagttcagtaataatgaaagaagaaccgattacaaaaggtaaaactgttaaatttgagaacctagcacagagtagaaaaatgaacaagatgatttcaagttttattgataagcctaaaattgcagacttgtttttcaatattagtcgtattgattattcaataaaggatgttaaacaagtgtttggtggtgtatccggtataatcaaggatgtagggctttgtttatttgctgatggcttgaaacaattaagtgtttatgatatcagtatgattcggacttataatgaaattatggaaaatatattgactcgtggtaaccaattgttgaatgttccaatgattactattaaatttgatcaaaatactagtatatttttgaacaatattttggcgtattatgaaggtaaatggttatcaatgtttgaaaaagaatttgaagatgaattcaatcaaccagaaataatcataaacgatatagaaaatgttcccaaaatttcatcaattaaaaagaagttattgaaagaagtttcaattattatgaatgatatttctatttcaatgaagccagtcagtttacagagttgtgctctaattattattgataagacaaacattgacttagtagcatatagtgatcatacgtttgttgttcaaatgatatcagataacgcttccgttttacttattgatgatattaataatgctacaattgattccaaaagttataaaggtaattggaatactgtaaacatgtggaaagaaagaggttttgtttctatcggtgatctcaccactatcatgatcagattgaaattgaatacaccggaatctttgatccatatggtgaagcctgatgaaaaagttgtcaattctttggttggtgttcaaattgatttggagaaagtttccttggatgtatgttgtgattcactgcaatgttttttacaattagtcaaaaatttgaagcaaccaatttatttctcatatgatgataaatataaggatcataacaaggatattgatttatttgatggaattgatgaccaatttttcaagaagaaaaatgcattaaatgatgatttaaatgcaaaaacaactgaaggtgattcaacaaagagtgcagacttagaaattgttgaaaacttttatgagaatgtctctggtgatcatgatggatccagtaaagtatccagtacaggtaaatctagtagtgaacaagtttccaatatctccatcaactggaaacattttaaagaccgaaatgattcacaacctcttctaaagattattcctttagatattcatataaatatagcacatgcaagtataaatctatttgacggttatgattgggaggagacaagagctcagatcaaaaaggcttatgaaaaactacaaaagaaaaataaacgaaaggaatatgacccgaattctgaaaacattacaatgactgaagagcctatttataactccattattttagatattcaaccatggcagagtgaaaatagtaatgataatgagaaatgagtccgctcaaacaattgatttaggtaaacggaaacttccacctttacaattgaaaagatcagctaaaagtaaagttaatatcaaattagaggatattgatattgattttagtcaattatcttcaaatgaaccacatcctaaggagaaaccaaacacttttaataaagatggaaatattgaaaattctgaatatgtgaatagtattcagataaacattgaagatgttgtaataattgatgatgtaccaacatctagttggaatatgtttgctggctatatgagagaaaatggtgaacgagaaacaggtaaaagtatggttaaaattggtattgatttaattcgtccaatagctacattagctgccattgaggtaattatgaaagttgaaattttaccattaaggttatacgttgatcaagatactttagattttttaacaagatttggtgagttcaaggatgaaagattcgttgtggtgaatgaagaagatgaagaattatttttacaaaaatttagtattgatacggttaagttgaaattagactataaacccaaaaagtttgattatgaaattattaaatcagggcatactagtgaatttatgaatattttcattcttgatgggtcagagattgtactaaataaaattgaattattaggagtcaatggatttagtaaactaaacaaattacttaacggatattggtcaccagatgtcaaaaagaatcaattaggtggtgttttatctggattaggaccatttagatcaatcataaatattggaattggtatgaataatttaatcactgtacctatgaaggaatatcgtaaggatggacgtttaatacgtagtttacaagttggtgcatatgaattcggtaagataaccggtggagaaattttaaaacttggggccaaactggcagctggcacacaaacaatacttgagaacactgaagaagcattaggtggaagtggatcatctgcaagagttgtagatagtaatactagaaaaacttcaagtggtagcattagaactagaagacgtagttcaactgcatcgtttggtgatgagggagataatgattatggtaaatattttgttaatcatagtgggggtgttgaactgagagctcatgatgaggatgatgagtatgctattgatgattatgaaggagaagattatgaagaagccaatgaagaagaagattatgatgaaagatttggtaaaattgtcagtaagaagaatgatgaatcatatgttgtaagtctttattctaatcaacctggttcattcaatgaaggattgaaagttgcttatggttcaatacaaaagaacttcaaaacagcaaaagatgcaatctctcaggcaagtaagaaggctagtgagagtcgaactactagtggagccgtgtatgagatagctaaggtaacacctattgttatgttaagacctgtaattgcagctacagaagcaatttccaaaagtttactaggaggggtgaatgatatcaatcccgaagaggggagaagagcaaaggaaaaatataaacgtgtaacatcaatcaatgaagaagatggtgatgtgtaggagaagttaatcgttatgaaatataatgtataaaataatgtataaaagaagaattaaaattaaatataaaaataaagtacaaaatttaatttggagttaagacaactttcattgcctttgtagttgcggcatttttaaaaatatcataagctttttcaaattcatcaaatttaaaatgatgtgtaataattggagaaggatctaatgaaccatcactaactttattaagcaattcaggagtcgagaaagcagacactaaaccagtagtaatttgacaatttttgatccaaagatcttgtaattttaattcaacacttttaccatgaacaccaacattagcaattgcaccacctggagtaattaaatcttcacaaagttcaaaagtttgaggaataccgacacattcaattgcaacatcaacaccaggttgtctacctgggattaaatcttttgtaatatctaaaacttgatttgataaagcggtacccttaattgcacctgaattaattgtatgagtggcccctaaagttttagccaattctaatcttgaatcatctaaatcaatagcaataatttgttttggtttaagagttttagcacttaaaagagctgataaaccaacaggacctaatccaacaatagcgactgaatctccttctttaacaccacctgacaaaactccaatttcataagatgttgggattgcatcagaaagcattaataatttttcaaaaggaatattttcaggaactttaaaaagagatgtatcaccgaatggtactcttaaatattcggcttgagtaccatcaatttcatgacctaaaatccaacctgaagtaccttcattaccattacaatgagattgtaaatttttcttacaataataacatcgaccacaagcggtaatacatgaaacaatacaaacatcaccgacattaaatttagaaatagatttaccaactgagtcaattttaacaattgcttcatgacctaaaataatacctttctttttgtctttagcagccaatgcagtagtttctggaacatcacctttaagaatatgtaaatctgaaccacagatagtagttgctaaaactttaccgataacatctgttgattttttaatggttggtttagcaacggagcgccattgaataaccccgggttcaatataagtaagtgccttcatcattttttttgcaaaaggaattgatcagtcaaagttaaagcatatatgatacagaaacatatgaagagaggaaataaggacccttttatagacgacatcagtaatagatgatcatcatacaaccttaattaagcggggaactcaaatggaaacaaacagatttaaattaagcttttattcaaatatggagtaagtccgaaatattattaatgacaatctcatgccacttttctaattggtacagaggctctcatataggaaaatacgttatgcttctccgtatagtatttcattgcatacagagagtggacaaatcccatgctcctgatgatgatttgtgtatatattgataagattcacagtttactgagtacaacacctgtatcatcaactatatttctattatcatctaacggtaatgttaaaatttcaatattataatatgcgattgacacgtacatgtaaaccattgtcactaaaacataagcgggtatcgctaatgcccaccatcttgatggataatagtatatacctattgtattaagtatagaatcaggtaataaagaccaacataaccaaattgttatgaaaatacatgaaatcacatatgctgaaaaacctttatattcagcctgtggagtaacagttgttgaaactgtaacatctgaatcacgagcaagttcatcagaaggagggaatagtgatataatagaggttgtagatgggaactctggcattgttcctatagcattgtatataacacgatcgacaattcagaccctgaaagctgtaatataccggctatattaaactcattgaaatccgggtaattttctcatatttgaaaattcatgtgaggtggtgatgcatggattggtgttagccaataacaaataataataatagtaataataacaataataataaataacaataacagtggaatttctgtatccatatctacacatacagtcatttaataactacaatgggtaagtataatgcattttacaactcaatgataagaagtactaacatagatatatgatatacaggctctaagaagatgtcgcttaatgacttcctctccgattcatcaatcggaggttcatcatcatggattgaggatgatttcgatatatctaatatactcgataataataataatatgaataatatgaatggaatgaatatgaatagtagtaatagtaattcaagtccatttgatagaaatcaaagatttaataataatttccaatcaaagaatgaatcagatattgtagtatttgctaatattgaatcatattttacaagtagtttaatgaaagaattttttgattcaagatatactaagattaataaatgtcatatatttatggatccacatgatccgaaaaagagaaagaaaattgctgttatattcttaaatgatagaggtgatttacagaaagtattaaaatggaatggtataataatagaacgtaatagaattatagttgatatactatcaattgatgattatcgttcaattgtcaatttcaatgaagagataggtttcaatgaaaaggaagaagaagaaaaaataaaggaaatggaacgagaaaaggaaagggaaaggaaaccaataaataatattgtaaaacctagaatacatcaaaatgataatataaacaatgatcgaattccggagattaagaaaagagagaaaattaatccgtttggtaatgcaaaacctgtacttgttaaagaaattcctattgtttcagaaaatactagagaacttgctcaaatattgaagaagaaagaagaagaggaagagagaaaaaaacaacttgaaaaacaaaaagaattagaaaaggctaaagaaaaggaaagaaaaaaatcaataaatccatttggaaatgctaaaccggtagatacattgaaaaaacaattagaaattgaagagcaattgaagaaagctgcaataagtgaaacaacttatgatatgacattattacatattaaagaaaaggaggaacaggagaaaactaagaaaaataaaaaggagaaagaggagaagaaagaggatgataataaagataacacagtagaaaataaagaagaaccaaaagtatggagaaagattttaaaacgtaaagaagaaaaagtagatgttgcaaagtctgaaacaaaggaaaaagatacaaatcatcagaaaattcaaccaaatgacaataagaaagatgaaataatagataagaaaattgatacaaacacagatgaaaaagtagaggataataaagaggattcgaaaaattctgaaagtaagaagttgaaaccaaagaagagaaaaccaaagaaagtattcaaaaatgctttcaaagaaaccgaagagataacgggtttgaaggatcaaaatgaatcaactgagaaaatagaagttactgatgcaaatcctattaaagaatcgaatgaactgagtgaagttaaagatgttaaagagaagaagcctaaaaagaatcttaagaaaaataacaaaaaatctccctccccaattcaggctgaaacttcaaatgaaaaatttgttgaacaatcagttgaaaagtcaattgagataaacaatgtgcatcctcctgttgaacaacattcaagggtacaaaaagaaactccagagaataatcaaaatggtgattcagcagaacctacactagatagacgcacagctcgtgaactaagtgatgaggaatatgcacaagaaatagctaaatttccacaaggatcaagagaatcaagtgggcgtggaagtctaagaggcagaggtaggggacgtggtcgtggtagaggtagaggtagaggaaggggtagaggacgtggaggtcaaggacaaggtccattcctaaatctggtatatgttcgtcctacagaaccagaaacataaattttttaaaataccataataaaatactattattacgactatcccataactttatacacggtatagattattagatttgtagaaatcaattattagatcgttaacaagaaagtgatttgaatgaagtaaaaaaaaaagaattgaagtatactggaacgttgtgatcggtatcgggtttcccaagatttaggatccgtgcattgcactcaacaaccggattatactcaaaaggtggaatataacccagccaaccgtccagcagaacactcccatgaattatatagggaaagtttatttccccctacataatccctattaattgtggaactgcccagcgtttgcacgcccaggaacctctcaagaggatattgtatggacggtgaataccaccgaatttcccactcgctaagtaaaataagtcgttcagtaagttaaatttaaagagactttcttgtatacgagtacgcacggacaacgtatccagtaactaatcgaaagcagagccaggccacagtaagtgtgccaactacgctaaatgcatttcaacttgttgtaaactaaaatatgtaagatagtggataatacttaattacgtaatggaagtaataagtataaaataagtttactcgttggaccttttatttgtgtaatagacagcgagtagcaatgagacggttggtattaattagtagattgttctctaactaatactctgattaatgtcccctctcagaagagagttatacaaagttatacaggatatcatacttatttatattacaatattaaccattccttaatatagttaattaaactattccttatcaatcataccactccttatcataattaattcaatttcaatctaagtcattcctttcttactccgacatctccgaacctccgtatctcggaattcctatttccatcttatcatctttacgtaatcagcttacctaatcttcacgtggatattattgaacaacttgtatttattcccttacattaccccggctgttgggaaacatcgtccctgatgttaaaattaaattaaatcaaatacttaaacaatttgctcatgagcacaaatcatcttggcattatgaaataaactatgacgaagtgattccgaagccgtattaaattgatcagcagtaatagttgtagcaagtaaaggatcacaatctctccaataaacatcaaaagtattcttttcttcatcaaaaccagcaataccacacatttgattaattcttgataaaatttcagcattagttctaggtggacgacataataaatcgactggaggaacatatggacgaaaatttttaatatttaatactctatcctttttattaatcttaggtaaatcaacttcaaaagcattatcattaatttttttcaccaatctaaatggaccataataagcaggttgaattttataatatttagcaaaagcaccaaaagcatcacgatgcaataaaatataatcaccaactttataattatgaaatctatgtgatctattatgatatttttcattcaatctttgagcttgtacaatattatcttgagcttgagttaaagttaatctcatacgtctagcatattcttgagcatttggactatatctattatcatctaaattccaactattaacacttttcatagaatctggtttatatcctatagctaattcaaaaggagaacatttaattgaatcatggtaagtactattataagcaaattcacacattggtaaaaattcatcccagtgtaaatgatcatttgaacaatgttttcttaataattgatttaaaactttattaactctttcagtttgaccatcagtttgtggatgattagtagttgaaaacaataaagaaacaccaaagaaaaaatgaatagtataccaaaatttattcataaacctaatatctttatcactagttaatctttttggaaatccatgatgtttaagaaaataatctaaaaataatttagcacaaccttcagcagttaaagttttcacagttggaataaaatgtgacatttttgaaaatctatcagtaataaccataatcatatcatgatttgaagtagttgttggcaaaccagtaacaaaatccattgtaacatcagtccatctaccttcaggaacaggtaatggttgaaataatccttgagttttctgagtagaggtgttattttgttgacaaacaatgcatctattgcaataccttttaattgtaggcatcatattaaaccaaaataatgaatccattaaagtttgataagttttccaaggaccaaaatgaccagaagtaggattattatgagcatttttaataaatctttgaggtaaactattataacgaggaataactaatctattgcaatcttgttctaataatgttttataataaagtaaatcatttttaagttgataatgtttaatatggtggtttaaatgaataggaatttcagatttatttttcaaagttgaataaacatcagcaagtacattatcttttttataacctttaataattaaattctttaattcatcattcataggaaaagtagtaacagtaacttcagtattattaatttgaatattattatttgaatttctatttgaattacctaaaaatttaatatgattaacttctaaagcatctttaacagacaatttttcatatggataacgacttaaagcatctgcggcagaattatctttacctgcaacatattgaatttcaaaatcatattgtgataaataatcaagccatcttgcaaccctagttgaatcaatcaaattttgatagcgtagataaattaaacttttatgatcagtaacaataacaaaatgtctacctaataaataatatctccaatttttcaaagcttctacaactgccataaattctctatcataaataccataatttaattgagctcctattaatttcttagaaccataagcaattgtacctcttgttttaccattttcatctaattgttctaaagtataacctaaagcactaccacaagcatcagtatgaacaacataagtacaatcattattccattttggatgtactagaataggactgttaattaaagcgtctttaagttgattaaaagcattagtttgttcatcttcccattttgattctttggtaataaatttatgaattggtacagcaatcttagaatgattcttgataaaacgtctataatatgaagttaaacctataaacatttgagcttctttgacagtagttggaattggccaatttttaaccttttcaattttatctggatcagttttaattccatttttagtaataacatgacctaaaaatcttaattcatcgtaaaagaaggcacactttgatttcttagcaattaaatgatgttctcttaatgtagataaaacacttttaatatcttcataatgttgcttataagatttggaataaataaaaatatcatctaaataaacttgcacacatgtattcaaatatttggataagatagtattcatcatacgttgaaaagttgctggagcattagtaagaccaaaaggcataacaacccattcataatgaccataatcagtactaaaagcagtttttggaatatcttcttcttggattcttacttgataataacctgacattaaatctaatttggaataaacaacagcagattcaaacttggaaataatttcttctatatgaggtaaaggaaatctatctttaacagtgttattattcaacaatctataatcaatgcacattctcatggttccatcttttttcttaacaaataaaacagggctattataaggactatcactaattctaataaatttttgttgtattaacttatcaacagttttggttaattcttccttttctgaataacttaaaggatattgatttctattaacttgcttattagattcaactaaaataattttatgttcgtgatttcttttaggaggaagttcatttggttctttcatagtaacaacatcattaaatttttctaaaatatcatttctgtatttattaacttcaacattattaatttctttatcaatagttttaatatcattttcttcagaggattcaacattcattgaattaatatatattagatatgaatcattatctttattattaataatagtagaaatatgtctatcatgatattcaattaaattaacattaacacttggtgttgcaaaactatctccaataaaatcatgtatatctaacttatcataatgttgtttgaaaaatggaagtcctaaaattaatttcttggtgtttgcctgcaaaactaaaaatgttcttttttctttgataggattattaaatagatcaacatcaatatctatatctagttcaccaatagcatcaacagtatcattaactaaaatagcactaattggttcaacatataatctaatcttgcttgataataacagttcatcacataaaattgtagtaatagcatctgtattggatccagtatcaataattgctgatgcggaatttttattatcaatttgtacatctatttttcgtaaattttcaatattcaaagcattaacatgtaaaatttcaggtaatgaaggaatgtttaaagttggactatttgtttcttgtttggaatcaccctttaacaatttaacttcagaggaatcacccttcttaatagtctcatctcttggaatcaccctttgagaattattaacaacagtatcaccttcttccttctcgacatttaaatgatcaacttcgggttgaatacttactggaggtgcaatataagaaaaagaactagtattattattattagatagtttattatttagtttagtaggacgagaaaaatgcatggaacgattaccaccgattggggtaaaatttgaattgtaccttttaaatggtcttttgtttctgaaaaatctttgcttattatgataaccaggtttatatttattaactctatatgggcgagaataagagcgtctaacaggagtttgatgttcgatattattgatccaaggattttttggttttgcttcttcaatatcattcaaaatagcttcagaatcttctgcataatgaatagcagcattcaaggtacgaggtttttgttgggataccatctttttcaattcaggtgttaaaccaagtaaatatcttgaaatttgaaatttagtagattcttcaaaatccaattcttgaatatattctttaaattgatcagaatatgtagagactttcattcctggaaccattttaaaagttagaatcttgtaatccatagcatgcatatcatcttcaataacaggacaaaattcttttttgaaatcacgtaaaaatctttcccaggaaatctttaaatactttggattcttctctaatttatgttctacccatttgtatgctctaccttcgagattaacaatagcttttctagcccagcttgattttgaaatacctttatcaattaaattaacgtgcaacttagataaccaagtttttgctttaagttgagcttcagtagtggagaattccttgcctttatcatcagtagaagaaccatcaaattttggaaagttagaactaagtttatcatttttagaagttttattatcatcatcagtatcagtatcggaatcagaaatatcagaatcagaattggagttatcagaatgggaattatctgaggaaaaagcatcatcaaatgaataatcagacatttcaggatcggaatggataattctaagaggtggtttaatatgtttcttctttttaataacgttctttgaatgtttgatagaatgtttctttgacaattctttcttcttcttcttttcagttaattttatttccttaatttgttgctttaaagcattaatcttatctttagcagatgacatttttagttgatttaatttaattaatagatgaatataatttgatttaattaggaacacaaacactagccggtgctaccaaatgtaaactaaaatatgtaagatagtggataatacttaattacgtaatggaagtaataagtataaaataagtttactcgttggaccttttatttgtgtaatagacagcgagtagcaatgagacggttggtattaattagtagattgttctctaactaatactctgattaatgtcccctctcagaagagagttatacaaagttatacaggatatcatacttatttatattacaatattaaccattccttaatatagttaattaaactattccttatcaatcataccactccttatcataattaattcaatttcaatctaagtcattcctttcttactccgacatctccgaacctccgtatctcggaattcctatttccatcttatcatctttacgtaatcagcttacctaatcttcacgtggatattattgaacaacttgtatttattcccttacacttgttaaaaatggcatttgccttttcagcatgcatgtaatggtgcacgggttttatggtgatttgcggtcgataagactattgacaaaaatattttgacattcaataataaaaaaatactttattttacacactaaaaaaattttctttctacaacatgaatttttcaaaaattttatttaaagacattatcttggatcttctaaaatgtaatattattttcattgaataaccacatacataatgagtagaggaagaggcggtttttcatcaagaggtggacgtggtggtagatcattccaaccacaaggtcctccagatagagttttcgaaatgggttcatttcttcatgcttgtgaaggtgatatagtttgtagatcaattaatgaaaaagttccatacttcaatgcaccaatttaccttgaaaataaaactcaagttggtaaagttgatgaaattttaggtccattaaatgaaattttctttacaattaaaccaactgaaggtgtccttgcaacttcatttaaagacggtgataaattttatatagctgctgataaattattaccgttagaaagattcttaccaaagccaaaacaagttggtccaaaacctccaaagaagaagagttcaagaggcggtgcatcatctggtagaggtggttcaagaggtggattcggtggtagaggtggttccagaggtggttttggtgcttcaagaggtggatctagaggtggctttggtggtagaggtggttctagaggtggtagaggtggttcaagaggtggttttggtggtagaggtggttcaagaggtggtttcggtgatagaagataaggttattcttcaaaatattttaaaatcaatatccatcatcattaatatatcactattactaaaactactacattactatttctgttaaaacaactgatttaaaaaaacactaatacttcgtttttactatgtaattatataaaaaagacaaacaaaatttcgttcaagtaaaatcttcttcaactgcatcaggtgcaacatttaagttactcttgattgtatttaaaattctaactttcataccatcaagtcttgaaaatttatcaaagttctttgattcaattgcaatttgatctggattacaatctttaacagcttcaattaacttacttgaaaattcatattcttttgtacttgcaaaacttggatcccattgtaaaaatctcatcaaaactgcattggcacttgaataatcattctcgtctgctaatctacataaaattgccttaaggaaatactcctttaatgaccattttgctaaattgttatttaatgattttttagcaatttcttcataaattgttgcagctttcttataattcttaatattatcatcacaatataaatctgcaacttttaataaacatttattactcaatgcagttgcggaatctcctttataccattcacttgcatcttcataacttttaatcgcattattaatatcttgtaattcattttcataaatttcacctaaatcacatttaaaattagcacttcttctgaattgaccacgttgaacaaacattccgattgctctttctaaaacttttgcagctctctctggtgattccattttataacatttaaaggattcaattaatgtattagatgcttcatcattactttctgctttaatttgtaattcacttgccttttcaaatatttcacctgcttcagcacttcgacgttgtaatttgtataaattggcagcttgaacatataaatctgctgcttcttcgtatttggacgtgctagatcctccaaatatacttgataaaaatccgccacttttattagcaattttattagcctatttgatgttagtacattgttatcaaagattcaaaatgaatattttatattatacttacttgtgcaatcaattcttcagggttcgacatttgttctttgaagaaagaaactgcaatggcatcaatttgaatcatcatgatagagggcgagctgatggttaaaaattagaactcgcatatttcatgatgtaatctaagtctttgtttaacatgtgtctaatgtgtctgtatttaatagtaatgatacttacgacctgtagccattcattactgattttaacagatttttaacaaattttgttgttttttaagcaaattaagtagaatatagagtaaatgtcaaaattcttaaaaaaaaattgaaattaaatatattttttgaaactacttttttcaagcagtttagtttaggaaatttttgaaaagacattgctacgctgttttccagttaaaaaaggtcaaaacatacttataatccgttatataattacaattttgcgcgcatcacgtgatctaataattttgacactgcagaaaaaactaaaaatgttgctgtaatggcttttggcaggagggtcaagaggttaggatcaatgtggtttcctcatcgtctacagtttgaggtgtccttttcgacttctgcggtcggtattaggcagtgtaagaagttacatttgtctttgccagcaatgaatttggttaccgctggagggtagaaatacagcacagctccaaatccgtgggagggcgacagggataacacttcgctggacttggattatgagtaaccacatcagttgactttgactgtctttttaaaatttagtttttttaattgtttgacaatcagttgcagtagagcatggttaatgaatgtatattgtagtgaatcaattcatttattttgtttcgaaaactagctacatttttattactttaaatattaaatttataagaattatctatatttctattataatttttcaacaacaatagcagaagctccacctccaccattacaaataccagctgcaccatatttaccaccttcttgagataaaaccgataataaagtaacaatcactctagcacctgaacaacctaatggatgaccaattgcaactgcaccaccatatacattaactttatttgcatctaagttcaataatttggtatttgctaaaccaacaactgagaatgcttcattaaattcaaaataatcaatatcatccagttttaaacctgcatgtttgactgcctttggaacagctaatgaaggtgcagttgtaaaatcaactggtgcatgtgctgcatcaccccaaccaacaattctaccaattggctttagtcctaattcctttaatttcttttcagaaactaaaactaatgccgcaccaccgtcattaattggtgatgcatttggtgcagtaacagtaccattttccttttggaaaacagttctagcagatcttaatcttttttcatctaattttgagacttcttcatctctttcaattacagtatctggtttacctctaatacctttaattgtaattggtgcaatttcattcttgaatttaccctcatcatgtgccttttgtgctttcttatatgatgaaattgcaaaatcatcttgttcttctctagtaattgaatgatctcttgcacatttttcagctgcaacacccattgctttaccatcatatgcatcatttaaaccatcctttgaaataccatcaacaattgagttatcaccaaatcttaaaccacctctagctgctggaacatagtatggacaattagtcatactttctgcaccacctgcaacaacaatatctgcacaaccagttaaaatagtttgagcaccaaaaataaccgctttcatacctgatgcacaaactttattaatagtagttgctggggtatcttcacctaatccagatttaagggcaacttgtcttgctggtgcttgtccaacattagcttgtaaaacgttaccaaagaaaatttcttcaacatctgttggtttaatttcaggaaccttttctaatgctgctttaactgcatatgatccaagatcaacataatttaatgatgctaatgatccttgaaatgaaccaattggtgttcttgcacctgctacaatataaacgtattccttagacattatttcaaagtttgtttgcttcatataacaaaataaaaagagaactggtgtaaaattggaatcgaaaaaccagctgagcttaaatgagcccttttaaaaaataactttccaagtttttcagcaacgcgtcgtataacgttttgtggcggaacgaccccactacgagtttgtgcaattctgtgatcgataatcttgcaaattgtatataattgggtcagtataaagtctctaaacattaggccatggcaacatcaccatctacgtctacgccaacatcagtaatcacactaggacctccatttccaccttgatgttgttgatgctctaataattgttcataagtccaaacagacactccgctttgttggttttttatgtcgattggttgtgctgacgttctcaaaaatttcttagcagaagcaatcgccatatcagtagataaattggtatctgcatctaataaaccctgtgcgatccatttaggtaattgccccttccttctagagaatctacgatcagccaaaaccataacaccataatcatctttacctctcaaaactcttcctaaacattgtgcagcatgcctcattgcatcgaaagataggaaatcattttctcttacttgataattatctcttaaaaactccaatcttgccttcaaaatacgtgactcagtgtattggaatggaataccgatcatcaaaactgtacgtccgtaatgatgatcaaaatcaataccttcagagactttacctctggcaactgacaataaaacagcaccacgtccattggaacatgccttcctatatgtttctaatgctaatgaagtttcttgcgcatctggagtttcaactaaaattaatttatatttccaaacttcatctaaaatacccattgtttgccattgtgaaatgatactttccatgtaaagatacgatgggaagaaaacaaccaaaccatcaggagtgattttagagaattcaatcagtaatgtaccataatttctaacaacactgggatcatttctaatttcaaatctagatgatatagcaacttgatcggaccccttagtaacaatcataggcaagaatgatcggcggtctaatgtcatactatatgattgttgaataactgtatcaaaattgagcattttaggatacatatccaatggtgatatggtacctgaggtgataataacacttgaaaacttttcaaaaattggtttaatggcaattgatgcatccaagcatgaaaatcttaaaataggattaggaactgtggagttttcagtctcaaagggttctaaaattagtgtaaaacctgactcatatgttgcaacgagtgatgcaaaagatgcaatatcttttaaggccataaaatcttcaatttctgatatttgtagtgttcttaccaataacgataatcgttcagagcaaaatcttaatggttttctatctataaatgtcaattgttttaaatgttgtagaaaggatgttggagtttcggcaatgacgtgtaaaaccttcattctagttttcaaatattcaataagtctcttcatgaatgatataaaatgttcagctcttctgatactaccaggaattgcttcatccaaaacatcactggatagcacgggactagcaataaatgtttcttctcctctatttacaatatctgattccctcaaaccttcaactaatttttcatactcatcttgcaatcttgtactgtcaattctcttcacctcttcaacttttttacttaagttattagcacctcgcgtagctcttttcaacatatcatcggtgatatccatacttaatgattcaatacaaacgttatcaatattatgggcttcatcaaaaataacaatactatcaccagataaatcctttgaaactctttctgcaatttttggatcaatcaaatagtgataggaataaataacaatattacataatggcatcattcttctgattgtaaaatatggacatgttccttcatccttacagtatttcagcaattgttcaaatgaatacacacctggcggtatcaaattattaggatctttttcgtataacttttcatgaaatgaacataaatcttcaatatcaccaccttcaccactttcaatcttttgttttaattcaccattagtaattcttctacacttttcatcaacaacgatactcttacgttcttttcctatctcaggatgtaaacataaattttttctacttgttaaacccaaacctctgaaatcttcaacatatcccaattctttcgttcgaaagtccattaatttgtgcaattccaccaatgctttttcaatttctgacatggtacgtgaacaatatataatttttctatgttcaggataatgcatttgatatgctactgtgatagataataatgaaacagttttaccagttccggaaggcatttctaatatacaattcccccctacatcaagtgatttcttgatatcacacatatatgaatattgttcagggtatatcctagggtacgggaaaatgacaggtaaatcatcaataaagaatctaaaattatgacaaaaatgttagtattggttcagctttttctcttctttttgtgtcaataagttctatacttacttcattgcttgtgtttagatcaaacacaattcaaactgaaaaatgaaggaattcaagaaagaaggcaaatattctagttaacacaggcactggtaactagatcttcaattcattacatggcgaggtgaaatttttaaaaaaatagttcttctataaatttacataaggctctacatgagtgttatatatacatttcataaattatggtgctttgacatctagagatttaacttcaatctgtttatcagcatctatgtatgaatcactaacaacccaaatgtaaagatcctttttaccaacttctggaatagtgaattcaattttaattgtttgactttccttcggaatagctaattttttgatagagtaaagttcattagatttacgatcacccaaaacaatccaccagtgttcaaatttcttttcaggatatgtagagctggcaattgtaagatcatcaacatcttcatctctattgatttcaacaaatatttcttttgattcaccagcaataattgttccatccaacttgtaattgacttctaggtttggatatttattgacaaaatcagcaacttttgaaacttctttttcagttagtccttctaatatagcttcccttacatcatcttccaactccattatatcatataccgttttaacaccattacttttacatcttttaataatgttgtcgtcaaagaatggaatttgtttaagacaattttcgttactccaaataccttgactaatcatttgacataagtccattgcatacatcgcatttaaatacccctgagatgataagatatcaactaaagcatatgatagcctatgcgccattggcaatatataatacaaatcttccatgaagtcgatacttaaatgctgtcttgaaaagtaagcttgaagtaaaataaaaacttttaatgaaggagactcaaaatgtaattcagaagtccattttaatggtatgctatgatataatttggaaagtgcaaaaccatcattctctctgattggaacattttcaaattcagttgcatgacataagagttctaaaatatttttcatttttagagtttcattcaatcttccaagtatttccattgtggcatatgatatactataatggttggcaatcatacaattatctgttggtatgatttcaattttatcatcatcatcctcttcattttctgaattattatccacagtgtcatcaatatcaagttcaacaataccagcttcttttaaatcatttaatgtattttcaatcattccagaaagatattcagaaagctcatcatcagtagttcctttcaactgataatatgatgggtttaattgtaattttctgtaaaacaaagaataagtaatccaatcaattgcatattgcctatttttaataagtttaatatcactaaccaatgcatcatgtataaaattgtttaaatgactttccaaaggtagcggcattgcaataaatcttttataataatctagtttgaatgaattagtgtatattatggcagtggctacagagttttgagtttttcttgctaatcctatcatttctaaaatttcattgattgtatagtcaataaatctatgttctttaccttcatattccttggttcctaagactaaaacagatgttgcactaggagcccaatgacaagagtctttggtaacaactagacttttgataacttccgagtcaaataaacttaaaacaatattcacatcacttgtattcattgaagaatagcaaaacccaacaccatatttaagacataactttaatgatttatcttgaaccttttcaagatacttttgaactgtttcaagattggttcctaaccatgatttattttcaattttaagcttcataacaaattctttggcgatttcaacaacatctttcttttgattaacaaatatcaagcaatttttttcaccctttctttcatcaaaatttgaaatatgattatacgctggtttaatcaagcatttaagcaaagaaggattatgatgaatttccaaaaaatcgaacttcacttctaatgggaaaaccctttgtctagcttcaaaatcaaacacattacttttcgggacatccaaccaatcagcaaaatccttgtaatttgcaatagacgatgataatgcaacaaatcttatttttttttctagattagttgcaatgtatctaaatctgttaagtacaatttcgtaaaaagaaccatcaataccagaaccaacaatatgacaatcatctgcaattataagttcaattgattgaatacttttcctttgttgccaacgtcttgatatactttcaaattgcagtggtgtacatagaactacatgagattgagctaatatttgcaaatcaattgtgatatctccaacaaacttactaatcacctttccacccgcaagttttgataaagttttcttccatttcttcaatgtgatatcaatacatttttgattaggttgaatatatattgctctaccaccttcatctttccaaagttttaataacgacagcaaagcaatatctgttttaccattacctttagaagttgcaaaaagaacattttcatcattattatagatcgaatcaaagacttgagattgaaacttattaaaatatttaaatgggaaaactgtagtgaattccttgataccgacattactgacaggaactaaatctgattctataacaggcgttaaggctgggaatttcttaggaactttcatatttgttaacatcacaggaatttttttctcacagaataaccatttatcacttattaaagaaacaaaatagttaggttgttcattttcagatagtgggatggaaaaactgatgtaatgaatctcattaatataatcttttctgacaaaaaattgatcactgtataatattttctcaccatcacaatcttcaactagtaatgtaaaactttgggtgaaaccatggatttctgtatcccatttccaacgaggaaaaatttcaaggtctaattgaatcaaacttggagtaattggtttaactgatgcttcaatatctaattgaggaaacttcgaaactaattcatatgcaagattaccaaatttttcagccttcaacgccttaataacgtgtgatggattagttaaagttagataatatttccaaggagtcatcgatctttcagcaatattaataatttctggtggtacatttggatattgtcttaatggtgtacttgttaaccaaagtttattttcgatcattttgcaaatatttaataaaatcttgacaagttttgcccaacctttctttaaacataaatcatatagtgctctaaataatctacccgcagattgggaaacatataccatatcagccattaatgcaaatccatctaatttaagaccggaaatataagcttgcagtaaaacattgatttttgataaaggatcttccacatcttcattaataggaattggggccttttctaataatttttgcaactcacccttttcttcttttctaacaggaatatacttgaattcttcactagtaccaaataatctaaacagttcaatttctccaaaatgtggttttatttgatcagtaaaatttttcatattggtatagctgatataataaaatgaagaaatcttacctagtacagtcggaacaactaaatcctttgaatagttatactttattaaaccgtttttagcaagaatgagaaatgaagaatatgccaaatcttttcttctttcaattaaatccaaatcattatcatattgaggtccaacataataaatttctctagagtgtaacatacgcacatatagataagtataacccatccaatcgatacattctttcaatgattttattgagccagcaacaatttctgcattaatgctatctgccagtttagaatacatttgagattcaattggaagttgttgattgagaactgcaagataatatttaatttgatctcgtgaagtgataattataccatcaccatgtgtatcatatcttggtctaccagctctaccaagcatttgaagaatatcctgtggtgataaatctacccatgtacccttttctggtgaatagatacttgtacctttaataataactgtgtgtgcaggtaaattaacaccccaagctaaagttgcagtggaaaccaaaactttaatatgaccttcagcaaatagatcctcagcagtttgtctatcatctctattcataccagcatgatgaataccaaaacccataggaagcacttgttttaaatttttattctttgaatttgaagcttctgattttaagatttctctgacaccatctgaaattttaagtaacttatatctatctttattttctgaaagtttattagctaaccatttagctgttttagcagtttcctttcttgaatgaacaaatataataacttgattattttcacttaaattttcgatcaccttttcataacatacatcattcattgcttcatactttttaaatgctttcttttcagttataccaacaaattgttgagccaatggacaaggtctaaatgatgaatcaaagtaatataaaccatttgattcaactcttaagaaatgtgcgacatctttataagtttggtaatgttgccgataaaccaacgaatctaacattataatcaacattatcatcaatatttttcatagttctagcaacaattgattccagaacaggacccctttcatcatgaagtaaatggaatttcatcaataataaccaatttgactaaattaatataagatgcatcattattttttcttgtgataacatcccatttttctggtgttgtaactaaaatttgagttgtctcaatttgatgttttgtaagattagaatcaccagtaagttcattaacagtaataccaaaatgtgataatcttctatcaaactctctaacttgttcttgcactaaagcttttaatggagcaatgtaaacaattttaaaattatttaattgaaatttcccatttgagtttctaaattttgataaagttcttaaaacagttaacatagcaacattagttttaccagcaccagttggtgcacacattaatatattattatcagctaaaaaagcgctaggataaactttagattgtattctattcaaagtggtcatttcatttgaaggaaaaacagattgagcccattctggtaactctgaaatttgaattgctacttcatcactcgcaattggggccttttctggaggtggaatgtgaatttcttcccaacttttttttgttcttttaaaagatccctttggaagatcaaattgagaaatagtcattaattttgaaccttgtgtgaaaactaaattattaagatcaatatttcttggataattatctgatgagcttgatgatttgactgtttttgtagaagatgaaatcctttttctttttagactccgtcaagggattggaattatgatcattatgattatcactatctaattttcttttattattatttttcaaagattgtaatttaactaaaatttgagatttttcagattcatcatcactttgtgctagtttaagtttgtaatatattatttcatggttttgtaccaatatgtagtatagttgattcatttcaaaatcgggtatattcaaaatttttttttcaaaagttcttaaatcaattattttattggtaaccttttcaagttcgttgaagattatcttagagatatctgaatgtttatattcatcaatttttggctgatatttagaaagttgtttggagatccaatatttgtcaatatttgttgaatcaaaggaaattatagtgtttggatcttccgtgtttgtaagtaaaacaatattatcggaatcatcaacatcttgattaacaaaattcatatcattattatcatcctcatccttttcatcttcactatcattgtttagatcttcatcttctgtatcattatcttcaacatcatcattttcatcatcagatgacattattatacccaacccatcactaattctttgatcatcaagatttaagttttgattataatcaataagagaatttactagagaatataataattgaaattgatcatcaggtatatttttgttaattgattcttctaccaattttttcttatttaaagtatttttatcatttgattttaaaatttcaattaaaatatcagctaaagattctataacatcatcaggtaaatcattatctaatatatcatcacaccatttaagtatttggttatatgagtatagagttgattcagttgaaggtacataattaagtatttcaatagtaccatttaaactagttggctttttaacttttgttgatttaagttttgattttgattttttagatatattcttattatcatttaaagcatttaacgatgactcaattgattcacgtaactgttttctttcatcatctgtatcttccgtatcatttttaatagtatttcgtatatttgaaccgaaatcttttgatgaaataacaccctttaatgaatgaggatttgtatcaatatcatttctatttaaaaaactaccttcatccaataaacgtttatcagtcctcaagactttatttgccatttcttcatacttatactgatttactgtaccattctccgtcatagtgatagtagtatgatttgtgtatatgtacagttaatggctttgatttgccttttttcacttgttaagagatctttccttaggtacaattttatttacatgaaaaaaaaattaaataaattcattacagatacggcttgattacgtaatagtttgtgaaatagacactatctctgtagtaaatacgcttaatagaattaatattaagagatttgaatagataatacagtaatatataccctatatcacatatagcatatacaatacaatacagtataataattcaatagtataataaatcgttaatagtaaataataataataataatggtaataataataataataacataataggacaacccacggaaagcagtgggagtcgctccctctttataattaaatttgccttctccactattagggtagacagtgttccgaattttgtatagttgggaagcggtgattattattttagatattggaattaatttaggcaatattttctacttgatatttggtttattctttcctttcgtttctctttcctttaaacaactcactacctatctgataatgttacgtcttttctcaaagagaccatccacagttaaggtcattccaaatttagtcagaagtttggcaactgaagctccagaaactccagatattgctaatttatctgatgttgttgatattgaattaccagatttctcatttgaaggttataaaatggatccacctcaattaaattatcaaactgaaaagggtaccttattacaaatgtataaagatatggttgttattagaagaatggaaatggctgctgatgctctatataaagctaaaaaagttagaggtttctgtcatttatctgttggtcaagaagcaattgctgttggtattgaaaatgcaattactaaaaatgatgatataattacttcttatagatgtcatggttttacctatatgagaggttcttcagttcaagaagttttagctgaattaatgggtagaagatctggtgtttcatatggtaaaggtggttcaatgcatatgtatactaatggtttctatggtggtaatggtattgtcggtgctcaagttccattaggtgcaggtttagcatttgctcatcactatagagatcaaaaaaattgtacttgggctttatatggtgatggtgctgcaaatcaaggtcaagtctttgaagctttcaatatggcaaaattatggaatttaccttgtattttcacttgtgaaaataataaatatggtatgggtacttcagctgcaagatcttcagcaatgactgaatattataaaagaggtcaatatataccaggtttaaaagttaatggtatggatattttagctgtttatcaagctgctaaatttgcaaaagattggactgaaaatgataatggtccacttgtcattgaatttgaaacttatagatatggtggtcattcaatgtctgatcctggtaccacttacagaactagagaagaagtccaaaatatgagatcaagaaatgatccaattgcaggtttaaaggctcacttattagacttcaatattgcaactgaagaagaaattaaagctttcgataaatcagctagaaaatatgttgatgaacaagttaaattagctgatgcttctcctccacctgaagcaaagatgaatatcttattcgaagatgtttatgttccaggttctgaaattccaatcttaagaggtagaattagagacgattcttggtctttcgaaaagggtggttttgcttataaataaggtaataaaattaattacttatgtaattaagctttataatagtttatatcatttcaatatagtttaaaataatgtatctttcgaaatagtagcacttataaaattattttaaaaacaaaaaagaatttaaagctcaagacaagttataaaataaggtaacaatatgccgaaacaaaacgaaataaaataacacaacttaaaaataaaataacatagagtaaactaaaataaaaaaatatttatattcacaactcaaaataaaagaagcagacctgtaatttcaatatcatgcatggacaatcatatagttaggatcatccttatgtgcacgatattccgaacttgaaatagtctccagtgtagaaacttcaactagattatcatttggatcagcactatgtgcagtagttggtgcagtttcttcagtgttgccgattttttcagtgaaaacagggttaacatttccacgatctaaatcagaatctaaatcataatcgtcatcatcatcatcttcattagtatatactttttcaggtgattcatgatctgctgatttaatttcaacttgtttagcttcagagatttcagcattggataatccagatggtgcaatacttgcatttgtagttgttgtatcaattgggtcattgtttgaaactggagcagcagacttaacttttgaagtaccattgtcaactgtagaaccgacaccagcagcagcaccagcacctgttgtaattgcaattggagcagatatttcagatttatttactgttttgcgattgctcgcttgattaattgaattgcttcttgatcttgactttaatttaaatttagaagtcagtgaatttgatcttgatcttggtgcatctggaatattttccttaactgaactcttagatggaacctttctaatttgttgagctaatggagtattcattttagcaatttgttcaggtgtcatatttgcaattgcttcatcaaccattgatcttcttcttacaaccgctgggtgtccattagtgctttcattagagatttgtgttaatggttcagacactggaactgatgaatctgggaatgcggataattcggatgattcagttggttcagattctgttttatcagtaattgtttcattatcacctgtagcttcttcttttggttcttcttcctttggttcttcttcctttggttcttcttcctttggttcttcatctttcaaaaccggttctttatgttcaaatgatgtatcatgtaaatgttcttcttcttcatgaataattgatggtaaatcagattcctttccaacaacatcattgaattcacccttatagaatggattatcaatattagtagatgtaccagcatttgaatttttaagttcatcatggaaatcagttggagtctcaacagatttaccttgtggaaccagatttgttgcatttgatgcaatattagatgctccagatgcaataccagatccaccaactgcaacaccggtagcaacaccagctccaagacccagagcaccagttgctaaaccacccgcaacaccacctaatgtactaccaacagtactagatttggtttttgcttcctcttgttcttttactgatttttccagctttaatctttcttcatttaatctctttttttcctttaatctttcaacttctgcagcaattcttgcattttcttcttcctcttcagcttttttcttttcagctaattgtttagcttcttctttttcctttgcaagtctagcttcttcttcttccttttcctttgcaagtctagcttcctcttcaatcttttcttgttcaagtctctttctttcttcttcagctgcaatcttaatttgttcttgcttttgtgcttcttcaagtctaacttgatccaggtgagcttgccaatcttcagcagctttagttgcatcagcttttttggattgcaggatatctttaccagcagtagagtaatgatcaatcttagttgaatgcgcattgaatctatcagttaataaaccaatttgcgagcttaaaacaccaacattggttgtagcttgaaggaatttagaattaatgataccaaaggatctatcagcaaccttagctctataattagaagtacgaattgtttctttcttttcatgtttttctgcaattaaagcttcaacctttttgattttttcttctaattcagccttttttgaatctaattctttttgtaattcaacctgtttagatttaagttcagttgcatcattttcaaatttttcagctaattctttttcttcaatttgctttgatttgaaagattctaattcattttccttatctaatttatattgatcagcatttttgattaaatcttccttgttagttgcatgttgagtgattgcatcttcttctgcttgctcagcatcttgttgatccttaatgattgcagctttttcatcttcaatgtattttgcagctgaagttttagaagattctgccttttgctccagttccttaaatgcagtatcatgagcatcttgaacatctttagttttagagtcgacagttgccttatatgtagctaacatacccgcaacaactgcttcatcctttaatctaatattagtttcaatttgagcagctttttcagcgtcacgtgcattgttttcagcaacacgatcatcaatttgtttcattaatggttcaagcttcttttttgctaattcataaatttgttcctcagttaagactaaacctgcacctaaatcaacacgacgatctaagttttcaattttatttttattcataatttgacttgcaatattgaaattatccttgtatcttcttaacatttttggatgtgatttaataactggaggaatttccataactgcaggtttaattgacttggatgctttagcaggtgtttcttcaacttgttttgcagctggttgttcagtttcggtttcaattggttcatcgataactacaacttcttcaatttcttcagcttccaaaggttcctcttcaggatcaacaatttcatactcttcctcttcaaattgttcagggtttaaaggagtttcctcttcttcttctttatttgcttctgctgttgcttctgcttgttcttcagctaactcagcctttgcagcttcttcttcaacagtttcttcattagcagtttcttcagcagtttcgtcaactttaactacaggaacactacctgcactgatataagagctataatttgcttcatttgcaactttcttctttggtgatacagcaccggaagttctgaatggagaaacccaatcttttgaagattgagagacagttttatgcaaaatagtactattatgggtaccttcttgtgacattgtactcaattagtttaagatttaataatttaaagtaaaaaatagacaattagttaagatttgtaaaacaataaagatctaatccaatactaaaagatagcataaaggagatagtttaattgaatttgctgctattaacaaaaaattgattatcatatcagcagagtaatagctggaggctgtgttgttcttttgtttttcaaatgtcccaaaagagaatcctcattaccggaaagggaaaaacctcataaattgggaaatgcttaaaaatctatgaagcgggcggggataaaatagtaaaatgttacgtaataacaaaatgtagcgactcatcgacgatagtatggctaagtcgagccttcgctgttattacagtgtgtattaataaagtttgaatcattgaacacatcagagacagagatgactttttaagagaaatatagatagcgggacgggtaatagacttctctgtatattttcttaataagttactacggagaggttcgggagccaatctatagtaacattttcaaaatgattattattaaaatactattacaccgaatcattattggaatcattggaaatgactcagattgattaaaagatcccgggagttttatttaaaatattacgtaactacctttttactattatttgtaatattttaatttattagtaaattgcattgactgcggatttgtcttaatttttgactctgatatttttagcttaaagtgaatcatctgaatcatcttctgattctatcattttaatttgataaccctccaattgtttctctattttacaattcgtacttctatacagtgattatcttatgaatttgataaatattattatacaatttacattatgttcttttgaatatttttttatttacaaatgatccaaatcaatattagtaataacttatataatcaatcgtgcctcatcaattaaattgtaaaaagcaattgcgattctcgggcgtctctcaatttctattattctccggacaaacggtaggacacgatttcacccctattgtgctccgaatttctacgatggtgccgcacccttataatgaatgccacaatttttagtctttttaacaattctcatagtaaaaatatatgtcgccaaagtcccctaggcgagggctgaatcaccgacatccggaatgttacgggctgactcatttgtcgtgaataatcggaaaactgaagaaactcggagaatctttttttttattcaaaatttttcaacatttctttttattactggtggtaactgattttactataaagtcaacaccgtttccccatattttagaaagattttataaattggaatcatccttcttggaatttgattaaaataagctacacacttttctgattgtttttatttaacaaaagattaacaaaagagataatgttgagaactcaatttaagtcacttgtcaagaatgtttcaaaaagttcttctttaagaagaacttttgcttctgtctcttcatcttcctcatcatcatctactgcatctgctaaatatttagcaggttcattagcagctgctgcaactgcagcagctgtttacactactatcaactcatcagttgttgcaaatgatgaagttaaacctttagaaaataaaattccagttgaagaatttgtgaaacataataccgctgatgactgttggattaccgttaatggtaatgtctatgatttaaccgatttcattgaaatgcatccaggtgggcaaactcctttaattcaaaatgctggtcatgatgcaactactttatataataaaattcacccaaagggtactattgaaaattttcttccaaaggataaacaattaggtgttttagttggtgaagctccaaaaattgaagttgttttagatgaaaaggaaaaggctagattagaacttttacaacatttaccagctctttcaagaattcaaaatatttatgattttgaacatattgcaagtagagttttaactgatgttgcttggaattattattcttgtggtgctgaagatgaaattaccttgagagaaaatcattatgcttatcaaagaatttacttcagaccaaagtgttgtgtcgatgttcaaaatgttgatacttccaccactttattaggttctgaaactagtgttccattctatgtctctgcagcagcatctgctaaattaggtcatgatgatggtgagtgttctattgcaagaggtgctggtaaagaaggtgttattcaaatgatttcttctttctcttcatactctttagaagaaattgcagaagctagaattcctggtgcaacccaatggttccaattatatgttaatgaagataaaaacattgtcaagaaaactatcaagaaggcagaagatttaggtatgaaagccatttttgttactgttgatgcgtcaagcagaggtaacagagaaaaagatattagaatgagaattactgaagatcatgatgaattagatgatgatcattctgttagagctggttcaacatctggtgctatgccatctttcattgataaaagactgtcatgggatgaagttaaagaaattatctcattaactaaattaccagttttattaaagggtgtccaaagaactgatgatattgaaaaggcaattgatattggatgtcaaggtgttgttttatcaaatcatggtggtagacaattagatacttctccacctccgattgaagttatggcagaatctgttccaatcttaaaggcaaagggtaaattagatccaaacttcaacattttcattgatggtggtgttagaagaggtactgatattttaaaggctttagcaattgccggtcaagattgtaaagttggtgttggtctcggtagaccatttttatatgcaaatactggttacggtgaaaaaggtgttagaaaagcaattcaaatcttaagagaagaattaaaagctgatatgagattattaggtgttaatactcttgatcaattagatagttcatatatcgataccagaagattgattggtagagatgcaactaaccatattttcaacaacaactattatccaatgactcaaattcaattcaagaatggtaaataattcattcgataatttccaaagattcattctattgatgattgattgagagaacctaactctctaccaaaaattttatagacatatcagttgttcaataattgaatctcgatttttttcttccactttttacactctttacacaaaagcaacttgatttacttgattttactttttaatctattccattagtaattactatttgtacattttataattttatctgggtttataagaagataatatgtattttttacgtctttaagataaaaaattaataaaaacacggtttacgtaattaaaaattaatagatgaaaaagtatatatcaatgccaatcagttgatatatactttgataataatattattttacggagtggtcataatatatcagagacataaatataggtattgtcggcttaaagaatatgagtttgaaaaccgatgatgatgatcagtctgcaaattttgataaatatggggaagatataacagagcaacacaaaccattatttaattctgaaatacccagtaatgaagctcgtcccaatgaacttaaacaagttgaaactaaacaagatgataagcctattagtattcaaaagatcaagagtaatttaagtgaaaatcttaataattggaacacatctaaaccatataaaaagttataccaaacggcggttgattttgcaaccccgatggatcttttggaagatttgaagagaaaaaaagacgatgttggatatgaatctgatggtataagatttgccccaatatcacaaaccgaacaagaaaaggaaaatgaagaattccccaatgatcataaatcaaggtactggacacctaaaaatattatgaatattgaagatgctccatattctaatagattagttattatattgttaatgttgagtttttcatattttggtaatttagcaagaatatctttccaatcattattgacttatcaaaatgcatatatttattataatcctggtacattgatttggataaattttacatcatgtgttattgcaggttttgcagatagtgcatatgatttctgggatgctatgtcacaaggttccaatcgacatctaaatttaaaacaaattcctctacatactggtataactgcaggtttttgtggttgtttctcaacttattctggtgttatctcagaacttgtattcgtaacgataaacggatctttaccagtgccaaataacggttacggagttatgcaattttttgctgttcttattacacaatttggtctatgtttttttggtatatatttgggtggtgatttggcttatggatttgactattttttcgtaccttatatcaaaccatatgtgagtatacgaacttgtcggttccttgaattttttattataattcttggtattgttgccacaataattaatattgtcctctcagcagtgttggattatgataatacttataaaaaaagatactcaattgcatgcttatttggagttttcggatgtcatctcagatacaaattgatggaattgaatggtaaaattatttccaaatggtttccaactggtacttatatcgtcaatgtaagtgcatgtataatattggctgttttgaacctattactatatggatattcagacaaagagaacaaagtaagactgataacaaatccagtttatatttgtatcattaaagcttttgcaaatggtttctgtggatctttaagtacatttgcggcaatggttaccgaaatggtcaatatgggaaatcctaaatacaggtacacctatttttcgatcatgttcatctcgtgtttcataccagttcttttaatacttggttgttattattggacaaagggaatggctcccgtgtagattatattaattttttatagattaaagaggttttatttataaattattaaagttgaacactagaatcaacttttggtattggtgtttgaggtgttgcactgttttttgtagtatttttaccatctttagaattttttacttgtgaaaatgccttatcattgagaaattcttgtcttttctctaatgtacccttttcagattgtacccatccaggaaataacatcaaatatcctgtaaaacttcttaccacacgacgacctttcatttttgcagcttctatcaactgtacttcttcatctttttgtggatgatctttgaaacctctaagatctttcatacttatcacacctttaacgttatcaagcatggaaatttctgtacttttaagtttcgatcttgttggtttgattgatccatcaggtttattttcatctgtaggttcaacattggcaaatgtgttcgttaaattagtatttacagtatcttcataaatattatctggtgcattttttgcccattttcctggatgggtattacttgtatctatgtttctgacgatatgtggattcatggtcaaaccactcacacccacacgtatatttgtagataacttattacctgtgacattgtttaaattgagattgttacttggtgcaactgagttaccagcactacctggagccgagttcattgcactggatggtaatatatccactggtttgggttgtatgtccacattaccatcattaagtttaggcaatattttagttgagttatcactcagcttcaacgtaagtttcacacttggtgtagattttccaattttagaatgcttgacaagctttgttatctgattggtcctccaattttccatgatcaactgacctcttttttgatttagtatgtggttgctcatgataaacatgtgcagtgagttcaggaaatttgctgagtgtatctgaaggtatacttagcgttaccagtttggatctttttgaagccataatggattaaacaattctgttacggaaaggaagaaagagctacagtgttaacattgaaatgttcactcacccacacatgtgttgtctctataataatcattgacaagggtttgttgaactaagaaggttttgcgcgtttcactcaatgcacaccatgccgtaacttaataccttaggtcacatgttaaccaatgctgacgtctgtagaaaacctagacagtatcatttcaacaagaaagtgaaatattagatttgtaaagttataaattaggtagagaaatatcatctttattcgagtttactgtaaaagataaggtatacagattatcattaaattaaaatacagatacacattcaaacatcaaataccaaatccaccacccataaatgcattacgggcattcttcttattgaccgcttgtggcccatgtagtttatcaattttaccagatggtggcatagaattgataatattattactatatgatggattcttagcactttgagggattccttgagaaggatacggtggataaccttgtggtggatacggtggataaccttgtggtgggtatggtgggtaaccttgcggtggataaccctgaggtggatatggcggatacccttgaagtggataaggaggatacccttgtggtggagtagggtattgaggatagcctgaaggaggttgtccttgtgggggtggtgggtacatttgtcctcttgatggtggtggcattgattttctagtgtccttcttcatctgaatactattatttggcggttttgctgatgagaattgattatgattttgaacttgtggtgaataatattgtgttggtatttttccagctgaattattagaaacatggattcgttgacctatttcttgatcgtgagaataatgtactggctctgatgaaaatgaagattgtggaaatggttgcattttaagagaagttatatttgatttacttgtaccagaattaggtgaatatgaatgatcactattagaatttttagacattggtgaatttttccctgtgtagtatgcattattacttgaataagtgtttgaattacttgaatggttggatgattccctagaatgatcagatattttatcatcaggtataactgaaagatatttgctaacaccttttggtttgcctgtttcaacagtagaggctggataaacagaagagcttctcgatacaactgactctttcatagacattgatggtggaggtggtgccttacgtattctactatttgaaacttttcttgcttcaccatattcagatttctgtgcatccagatgattcatacaatctttgaattctgcttctaaatcttcaaattcggtttctaattgtttattggtgataggtgcagaattgatggcccttttatcagctgaaaaacgttcatcacaaatttcaggtggaggaagtattggtattgtttctggtgatctcaagtttaattttggtgtagggttggtctcgtatgagatgtttgaatcggaatgataagagtctggagatctactttgatctctcagtatttcaaccctttgattaggaagcgtggattggaacttcgtttatgactggtgatctctggttttctgcaaggtatggatttgaaggttcaggggaacgtagtggagatgatgaatgtggtggtgaataaacagtaggtggtaaatttgctctaggcggataattcgatcttggcggtgaataacttctcggtggtgattgttctctatttggtgaatatgttctaggagataaatgctctctattaggtgaataagttcgaggtggtgaatgatctttaagtggcgaacgtgtatatgccagataattagctggataattatcttgagatgaaatatgtttctcttgtgagtcatatgtttgattaatgttacgagcattgccatctgatacaagatctccgtttctatttatttgaggtgaatttgcattttgaggatatggattatatgttccaactactttaccagctcttcttctgggagaacgttcgggtattttatcattaaatgatgtttcatagttattataatttgctgatgagctattttctgcaactttgttatacgtaactgttggtaatacctttgactttggtaatttaggaatgacagaattttctccactatcaaaattgaaatcaatgcccagcgtatcaaaattcaaaaaagtactttcttcatccaaatttggcaaggatatacgaatttgatcggatgcaagagtatttggatttgttttttcaattatgctagagctctcaggtactgttatagaaggcggtggttttcttattttacttgtttgagatgaagtttctttgtttgtaccataatccttctttggtaaaggtgggggagcctgtttcatttttttctctaacatatctttctcctcttgttttttcttggcttcatgtctttctatttcaactctttctgcatccaacaatgcttgcttttttattcgttttgcttccagttcagcctttttaatttcttgctccaattgttttaatttttcttgttttaattcaagttctaaatcgtatccatctcttgctaaatcttgctcctcaacaataatccattttctaaaaccttcggctagttccacttccataatgtacgtttttccaaaggttttcttttttaggtctgtttgttcaattccaagagaagctaaccaggtccaaataaaataatcttctatagtaactcttcctataacagctgtgtaatattcagttgcatccttttttgatgacatcctctcccttgaagtcatatcagttgaccaaccaggaacaagtttaaatttcaatgcacttttatctttaccatcacaaatcaaatcagaatcatacaagcataagttatctaataaacgtgcgccttcagcagataatttatctgatatttcatttttatctttaaaaactctcttcaataacaaataatcttctcttgtataaaataaggttggatcatcaaatttcaaagttttattgactcgatttagtagttcaaatggatttttggaagggttagttgatctgatcgtcaccattggaatttcttgtaaattttttgaagcttctatagatgatgcagtaataggaggaggatattctgtagacttaagtagattttggaatattctaggtaatttatctaagtcgccattaggaggcattgatttcacaaatgctaataataaatgaaacatggcatctccagctggaatccattcatacaaacctctttgaaatgatgggatcccatcattcttacttttgacaggactgaaagcccataaaccacatagtttgcttaattttttggcagtcattaaattttcttttgaatttaaaattaaagcaacaattaaatcaaagaaatcgtaaactatggatgcatgtgctcctgatgataaacaattaggcataaattctagaaaagctttatcaggaaaactcgatttgtcttccattttaacaaattcagtatatgccttccagcctataattgccttaccaggtaatctacaccatataaatttcaaagctcccattaaaatatattcattggctgatttgattatttcctttgcttcatcttcttttattggcattcccttgacaaatatagtattcaaaaactttttaagatctgcatcgtgttgtttaggtctgaacggaagtatcaataatgggaccttggtaccctttcttttcaattctgatgtgatcaaatgtattaaatctttaacatttttacgttcaaatgttatatcaaattctttctcctcaatatattgatcatctgttttaggtttataagattttttgaaatcatctagtttgtcatctgtcacatcggggcagtacataaatgaagaatctgttttcgattctcccattttaacagaatctgagacaatgaaggatggaatcaatggaatccccttcttcttcatgtttatgatcaggtcttgcagataaaccggaaataagtcactaaaatataaaaaaaagaatagttttaaatgctgttgatgtaaatattgattcaatattttgatcagatggaatttttttgtcagtgcgaagcttaacaatttctgctgggagattggtgtatcgttatacgaatccgctaatggaacagttactttcctttattttagatatatctggatcattgattaacgtgataagtaaataaaatggttgtactatctgatgtggaaatggaaaaagctcaaagctaccaaaactattggtattattggattgggagatatgggtcttttatatgcccgtaggttttctgaagctgggtggaaagtttgtggatgtgatcgtgaagaaagatacattgaacttaaagaaagtatgtcatcccttttaccagatgttgaaatctttaagaatgggtttcatgttactagattagcagattatatcatttactctgtggaagctgaaaatatcggaaaaatagtctcaatgtacggaccctccacaaaagttggtgctattgttggtggtcaaacatcatgtaaaagttctgaaattgaagcttttgaaaaatatttaccggatgatgtggaaattgttagtgttcattcattacatggtcctagagttgatactactggacaaccattagtgttaattcaacatcgtgcatcggatgaaagttttaattttgttgaaactttaatgtcatgtctacattcaaaacatgttatttaacatatcaagaacatgataagattactgcagatacacaagctgtcacagcatgcatgcatttttaagtatgggtgttgcatggcataacagtcatcaatatccttgggaaacacctaaatggacaggtggtatagaaaatgccaaaattaacatttcaatgagaattttttctaataaatggcatgtctatgccggattggccatcaccaacccttctgcacataaacaaataacacaatatgcaaaatcaacggaggaattgtttacattaatgatccaaagaaagaaagatgaactaatgaaacgaattttagaagcaaaggagaaagttttcggtcacttaggaaagaatcatcaattattattaaatgatgatttattacaacaatactcattatctaaaactccacctggtggcaatcaaagaaattcacatttatcacttttagcgattgttgacagttggtcacaacttgatattgttccatatgatcatattatttgttccactccacttttcagaatattccttggtgtctctgaatatttattctgtactccaggattactagaggattgtataagtgtttcagttgatgatataacattccgtcaagatgatttacaattcacaatggcagctaaggaatggtcaagtactgttagttacggagatttcaacttatacagacgtaaatttgaaaatactcaaaatttcttccaacatatgttcccagaagctacaaagatgggtaatgaaatgataaaaaccattttacaacgtgtcaaagacaatgaatcgcaaaactagaatatttatcttatagatgtacatagactctaaataactcttaataactcctattaataatatattaatagaaaaacttccctaagtaaggccccttagtgacgatgtgaaacgccttagtgcggaaaattcgaactcactcaccaggcttttttttcatgcaactataagttttgatcagatcatcaacaggttgatcgtttcgacttttttctcttttcctttctagaagttaagggtcggcagtaaaaatgggtaacatatttagctcgatgttcaataaactctggggagttaatgaagaagttagaattctcattcttggattggatggtgccggtaaaactaccattttatataaattacaactcggagaagttgttaaaacaaaaccaacaataggatttaatgttgaaactttacagtacaaaaatatatctataaacatgtgggatcttggtgggcaaacatctattcgtccctactggcgatgctattatgctaatactgctgcagtgatttttgttgttgattccactgataaagaacgtatggaaacagcaaagcaagaattacatatgatgttaaaagaagatgaacttgtggatagtgcattacttgtgtttgcaaataaacaagatcaaccaggtgcattgactgctgcaaatgtctccaaggcattaggtcttgctgaattaaaggatagaagttggagtattgttgctacaagtgcaattaaaggtgaaggattaaccgaaggactggattggctgattgatgttataaaggatgaacaattgtaaagctagatctatatatatcatatatatatccaagggaatgagatgtattaaataacagatgaatcaaaatattctcttcagttcaacaacttatattagctaaacatgtataaatattacctataatgttccacatacttaatcaatcaataatttacgaataattctgtaatcacctattctcaatgctttaatcatgttttgtcaattaaatttgataataaacggcttccatttccgtagaatctgagggtccggttaaattcaagataatttgaattccgcatgtcttttccacttcctcctattattgtctttcttttttaaataactacatctagcataataatggaggttataatacggcgtcaaactatgttaagatcatctggaatactaagaaaaggcttacttcaaatacgaaatgtttcaagtggaagtttgaaaagaaataatttacctcaattcaccaataagtcaccaaaattccattacaaattgttcatgggggctggtatcttttcatctactgtagtattattcctcaattataaagaaatacacaatgacgataataaaaaattattggtggaaggttcacagccctttaaagctaacaattggcaaaatgaaacatctgtgcagggtactttaactccagatccgtcccagtcaacatttgaaatgggattgtttgttgcatcccaaaaggaaaaggaaagaatagaagacgagtatagaaatgaacgtcgaaataggaaatatacaggatggttatttaaaataggattcattatgcaagattatgtttatgaaccaattgtgacatttggaaggtttttagaactcagttgtatttttttcccagttttcttagtttatcccataactttttttgggaagacaactaaaacaggtgatagaactggtgctctgttatggtattggcttttacgtcatgcagctgaacttggtggtgcatcgtttgttaaattaggtcaatgggcagcatcacgtactgatatatttaatcaaggactatgtgatgaatttagtaaattacatagtaattccaaagaacacagttttcgtcaaactaaaaagattctgaatgaaacttttaaaggtgtagattttaatgaaatatttaacgaattcccagaaaagccaattggatgtggtgcaattgcacaagtttatttagctaaacttaatgaaaaattcattgggaaaaataataagcacgatgcttatgttgcagtgaaagttgtacatccaagagtagaaaagaatattgcaagagatttgaaaattatgtcattttttgcaaatatgattgatgttattccaacaatggaatggttaagtttacctcaagaagttgaacagttttcaattttgatgaatttacaattagatttgagaattgaaagttataatctcaacagatttcaagataaattcaaaaacagcaatgatatacacttccctaaacctagattcagctctagaaaagttttaattgaagagaaaattactggtattgagatgaacaagatattagagataaaacatatgagccatgatagaatgttaaaatctattagtgacaaattaattgattcatttttgaaaatgatgattttagataatttcactcatgcagatttacatcctggtaatatttttgttagatttgttaaatccaatagtcacaataaggtacctgaagagattgatgaatttgaaattgatcaactaaccgataaattgaactctttatcttccagtgatctgagttccgaattaaacatgttattcgaaaataagtatgtccctcaattatgttttattgatgcgggtcttgttacagaacttgatgatagcaataggttcaattttattttattgtttaatgcattagctcaatttgatggttataaagctggtgaattgatgatagaaagatcaaagacacctgaaacagcaataaatgaagaattatttaaaatcaaagttgagaaattagttgataaagttaaagaacgtacatttacattaggttcagtttcaattggagatttactcgatagaatgttaggtatggtacgttcacatcatgttagaatggaaggtgattttgtcagtattgtcgttgcaattttaattttagaaggtatttgtagacaacttgatccagatattgatttatttgcaaggtgggtatttgcatggacaataggatttccaacaatgcaattttaatgcacatctatgtccaatgttttaattttttatttctcttatttcatgaaacatatactaacattatttctactgttttacttttctacagatctattccaattttaagacaaattagtttccaagaaggaaagctgatttttgagaaaatgaacaagattgccatgctcaaagtttgggccactttggaagcaagacaattcatcaatgcttcagtgcatgatgtttatcaactcgttaaatctgatggtttagcaccaaactattaagtaaactgctataaatagaacaataatattgttatcattattattatcattattattattattattgtataaacttgaattgatttctgtaagtggaaataacttccgcattaattaaaatttatttaggaacgaggcatgcatggctaatacttaaaaatttattgataacaattatttctcaaatttataagtgtgaagtgttgtcgattgcgatcactcaaatatactggcactcatatacatcatatgtttatcctgcttcctcaatttcattaaaaatttggacttaaaattgatctaatagtgaaaagttttgaaataaaggcaaatgaagttcggacatacgcttttgactcaccaggttcctgagtggcaacagcattatattgattacaaaggattaaaaaaaattattaaggcaatatatcttagacaacaagaagttgcagaatctgatccagatgttgatgtccatacagattctcaagtgaaaatcgatttagcaagatttttctttatttagatgttaatttagaaaaggtaaatgatttttatacttccaaatatttagattataaaagaagacttaacaagattgctaatgtgttggatcaaaatggggatgatattccagatgcagaggaatatgatgatttgttagatatattacttgaactaagaaactgttttagaaaccttaaatggtttgccgaattaaatagaagaggttttgttaagattttgaaaaaactggataagaaggcgggtactttcaaacaagaagaatatttgaaattaaaggtttatacttcttcattttgtaatgaatctgaaacaattgaatcattgacattaatcaataaacacttgaacaaattattaaattcttcaaacaatgttcaatctgaaaatctttcatcatcatcaacttcaacaatttccaacttagagattaataatactatgaaaaaaaatgtcagtttatcagaaactaatcccaccaaagattgttcacaatcacctattaattttggagttccacacaccaaagtttccagcttagatgtctattcagtagcaattaaaaatgatgatgctgaaaaactcgaaacactcctcaataaaaactttatgtcattaaatttggcgcctttaagagttctgttatcattattaaataaagcaactttagaatgctcatataaatgtattgatagtttactccaaatcattccagtgttatccaataatagtgatgtttccggtagaaatttcttacatcaccatgtgattgcattaggaaagaaaactttggatgtggatcatgctaaaaacaaaattctttacaatgctggtgaactgaaaagagcggattataacgaatcattgttgaaaacatcaggtcctgacggtattaattccaataattcttttgaaggtttattgtacatgtttgagaatttaccaccacatttaaaatttgcaatcttggaaaacgataactataagagatctccgttacattatgctgcacaatacggtttgaaagaggttactcatattattattagatttttaaaagaatggaatatgtttaatgacagcgtttccttagatgatgtaaaagtatggggtgatgctgaaagtcttacaccaatccatttggcaattttaggtaaacatccaaagacagcaaatgtgttatttgaggcgatggacaaaaatatttctttaacttgtccttatttaattcatgttgcaactaggatgaataaccctgaattattgaaactgataatcaaatgtaaagggattgatatcaattattttgaaaattcggaatcaaaggaaacatcgttatatgttgcatgtaaacttaacttaaaggaaagtgtcaaaactcttcttgaaaacggtgctgatacagaaattggtgaagcaacatttggttggactccaatctttgttgcggctgcgaatggttatgaagagatagttgatttgctaattgcctctagtgctaaatattatatttacgatgaaagtggctggaatcctagagaacatgctgctttacgtggtcatatcaatataattgataagcttaccccagaaaattatgatccatatgaatcactagatattacaaagtcattatctccaaggttagcacctcaggttgctagaaactcttcaacttcaagtattcacaaactttcagatagtagatcaaaaacaacacccgaaccttcaaatgaagccattgatttaaatgttcttaaagctattaacaattcgtctactcaattatcaattaatgaaactaagaaagacaaaacagttgttggaaatagatatcttaaaaaaggagaatcactgattttgatttcaattggtactacagatttaagagatgaaacgccagcgattgaattgaacaagattccttcaactgaaattcactcaactgaactagattctgcattatcattggttgttacttcccctaatgtagatcctgaaaacaaatattctctttcattacctttagatgataatcacggtagctcaactgatccaatcacatttaaatgtatcgatgaagatccattcaatgctaccttatactttgatcttataccaacatttgactatgaagtgaataaagtatcatcaactaataaaaagttgggtagaggtgttgcaattctgaaaaatttatataccggtgttggaagtaacaaacgatctttattcaattgtgttagaatccctatcttgagtgtcaatacaatggaggtcataggtgttatcaaatttgaagtcttaattgtgaaatcgtttgaagaaactgatagtattccactagatgcagatatttattggaagagtttaagacatccaagacttattggacatagaggtaatggtatgaattcaagaaataaaaaatcattacaattaggtgaaaatactgttgaatcgttcattgcagctgcttcattaggtgctcaatatgttgaatttgatgttcaattaacaaaagatgatatacctgttatttatcatgattttattattgctgaatccggtattgatattccaatgcaatcattaacattagaacaatttatgcatttgaacttgggcaaggacaaacataataatgttaaagagaatgctaaaattgtcaaagatgatttatacatcagagctagatcaaaatcaaataataaactagaagagtttgatgaagataccaataatcaattaaataatgaaagaatgaaattaacaaaaacatggaaagctaaagaattcaaagcgaatacaagaggtagtacaattgcatcatcgttcactacacttgaagaattatttgacaaggttcctaaggaagccggtttcaatattgaattgaagtatcctatgttggatgaatctgaagctgatgatattggacaaattgcacctgaaatgaaccatttctgtgatgttatacttcaattagtttataagaaatacaataatagaaatgttatattttcatctttccatcctgatatttgtttaattatgacattgaaacagccatcattccctgttttattcttaacagaatctggtgttaactttatggcagatgttagagcaagttcgttacaaaatgcaattagatttgctaaaaattggaaattatttggtatagttagtgattccgttccattgattaaatgtccgagacttgccagtgttgttaaggcgagtggtctagcttgtttcacttatggttctgaaaacaacaatccagagaatgcaagattacaaattgatgccggtgttgatgcagtcattgttgacagtgttatagctgttcgtaatgaattgtctagatacgatgatgagctatctaaattgaattaaatgtaagtaagtagtgtgttacgtaagtagttgattatgtaataaatttatctagaaattttacgtaatgatctgtgggacatgttatcggattgaaggctgagtacataaaaggagtaaattaatgcatgattgaagttatacttaagatctagctacttggttttctttcttgaaacaaataaaaatgagctcaattattgcaagcaacttaccaattactgccactgatgcaaaaatcaaggaattcttcactttctgtggaaaaattaaagatgtcaaagttactgataagaaggaaaagacacaagacgttcaagttacatttgaaaaatctagtgccatttcaactgctttattattaaatggtgcagaatttgaaggttcagtaattgaaattaaggaacttggtggtgaaaaggattccgaagcatcaacctccgataaggaaactaaggcagatgatgcagatattgatcaagagagtaaaccaaagagtgctgttatcgcagaattattagcaaatggttatgttttacaatcttcactaattgaacgtgctattcaatttgataaggagaagggtatcagtgataaatttaatgatttcataaagggattagatgaaaaatatcatattcatgaaaagaatcaacaagttgctgaacaaactaacaatctgtacaatgattggggtattgaaaaacgttggaatgatggtatgagaagtttaaatacttacatcgataaatttaagaaagacaaatatggtagtcaagttcatggattttacaagaatgttgctaatgactgtgaaaagtgtcaatgatgaagcactgagacttgctgaacttaaaaagcaacaacaaggaagtgaatctagtagtggtccaggtaactcactcaatccaacaattagcagtatcacacctgactcaagtactgcacaagctgctgccgctgttccatttgaggaaactaagtagttttgaggaattatagttttatcaaagtttattttacacttatataacctatttaattatcaaattgtcatgaatttttattctctattaaaatatttataagtttactacctgagtaaaagtaattgttgtggttttaatgcagccctacaaagaggacaggacctactctgttgtgcccattccagaacacatgtccagcaaaatacatgaccacaaccagctgcagctgcattttctaatgaactcaaacataaaaggcatggtgtttctgttttaaattccactgattcttctgtttcttctttttcactatcgtgttccttttcatttacattatcgtcaatatcaacaacgagtttttgtctctctttgactatatcttttaccttgacaattccttgaaatgttaactgtgctgcgagtgccatacctaaatatttgtattttcctacattggtattatctttagaaacttctccactacttgacacatactccatccctagtaatctcttacctatatcatagtaccttccaaagaaataaaataatatcaaattgagttgactgagtagtttaccatattgtgcaatattccctaatcttgttgcaaataactggaatgatgcatgcaattacatataataatctgcgtctaattccaatatttcgattattattaacatatctgatatcaacatactcttctcctaatgtacgtgatccaattcccattgttgttagaagataaaccactcgacttaatatacgaatccaattcttacctctttgaacaaatgctgcacccttaaattcccttatggtatccaaaattttactttcaacatctttaacaaaagattcatctttttggtgtgctcttataatagcagaagccttagctaagttcaaatatcgtgagtattccattgtaacctacacacctacagaaggaaccaagactctcttccccagtgtataatcttcctgataacagtaaaattgttcatgataatcacaacaagtcgcgtctttgcagaacatataaaaaaaatatctttggcattcggtccttccaacttaatgctacatgacccaatggctttgacatggcaagtgaacagcacaataataacgatacctctcagaactcactactacacgagttacaagagagtctaatggaaaatgagacaactactaatgaaacaactcaagaaaaactgattcaaaatgaattaacaccgttctctttacaattttggaaacctaacaacataatgtccgtagaggacactcctttctctaatagattcctagttacattacttgtgattgcattttcaataccgggaaatcttgctaggatttcattacaaaaactaactcaatatgaaaatgcttatttaaattatcaaccaggtacagttgtttgggtaaattttgcagcttgctttataatgtcttggtgtaataatgcagtattattttggtcattgatactaaaagattctaaaaaatcaaatatgaaacaattggcgttacacaccggtattacaagcggattttgtggtactttttcaacattatcctctgctatgatcgaattattcttttcatcattggatatgtttaatgggaaactacataataatggttatagagtaatgcaatttttttcaacttttataataacatttgcagtgccaattctaggacatgttttggggaaacattttgcagtatttttcgattggtttattgttccaaaactagctaaaatattaacatatagaaatataagagtgtttgaattgatattttccttgctgggtatttttgctataatagcaaatatagtattatcatgtactttagatctctcatattggtataaacgaacgtattcattttcaatcttgatgggtgctttaggtacagtacttaggtttaaattatctgtgcttaatggaagatttattaaagaatggttcccaactggaactttaatagcaaacattgtaggatgtttgattattgcaattcttcaattgttaataaatggtttgaatgtaaataaaaggttattaattacaaatacgacacatcaatttatactgtttggattttcaaccggtttctgtggttcattgactacaatgtcttcacttgttaatgaattatataatttacagaatccattatttcaacatgcatatttttggtgtacatttgcaatatgtttcagtttgattttaataattgatggtagttatatttggactgttggtttccaaaattaatgagtagctttttatattatttacattagtttataaaatttataatgatcggcatgaatattttgtataaaagaatcaagttttatggaaatcttaatcaaattggtagataaatttagtaccttttttaccctttttaactgcctttatactaactcccatttcgttcatattaaaggcatcgttactactacctaatgaagctgccgctgatgatgatgatgcactccaaacacctgaatcattattaacaggtttaacacgtggaataactttcttaggtggtgcatttggtaaacttgggaataatgttagatctacagctttacgtgcaacaggtgtactatatggcgatattatacttgttctatttgcagttgaagatgataataatgatgatgatgatgatgatgacgatgctgatgatgatgatgataatgaaggtgctaatgaagttgaagaatatgaaggtgttggaacttttccccattgatttttcgttttgttaccgctattatctgatattggattatatcccggaattgaatatccattggtgggaacatttgatgaaatacctctcgttttcaatgtcttgttttgttttattgttattttaggacctgatttattcttaatagatgatgaacctggtaattcggggaataatgcactattattcgaaaatttcttcaatttagaacttaccttggctttaggttgtgagtgattgatagttggatcccataatgatgcagatattgatgttcctggtaaagatgggaaattttcctctaatgcacgttggtttaactgtggttggtttattaattctaaatttttgcgtaattgagatttacttggatataatcctgataattcatagattaataaagtataatccacatctttactacctttaaaaatttgttgatacttattgttcacatcactagctgatatcaattctttactataatcatcatttaccttttggaattcagtaaatttgtctgcattatagttcaggtaatgcttagctctttcctctaaccttttccttttcaattcatagtttttctcggtatcattagcttgaatcattttgagtatgtttcttttttgtattctttgaatttgaaacagtgaataattggttattaaaagtatttgtgctcaaaatattattaccatatatagctgaatgttcttgaactaaatgtgtttttaaagcaatttcatctgggaacacaacaaatttttgatctaaacatgattgaacattacaagtataatgagccgtttggaaatgttgatttaaatgatcataatttctaaaatattgtggattgcttggatcaatttgttgacaaatatgacatctttcatgactatctctcatatgaatgtataattcatcttctgaataaaatcttttattggtacaaaatttacattctggatgacccttgaaaccagctgagtcacccttagattgatgagcgtgaagttgtttcctattataaagtttcaattccggaatgaatgcctttttgaatttcacacataattcacaatagaatttaccgtgaacatctttaacgtgattgtttaattctttgaaattattcattctagttccttccatattacaattttttattggacatgtatactccatcaattttaaagtttcatcttttgcatattcactagtgaatctaataccgtaatcgtgttttgaaggtgagattaaatctttttgttttactgattcgtatttgttgatatctaagttatctgtaaatatgaattttgtagtttcagtacgacaaactaagcattgatttttcttataaagagcaatgtttctgaatgaacataaatgacaaacttcatgattacatggtgataaggaaatgattttagtattttctgcacaaatcaaacaggtatgatcattatcatcatcatgcactgatgaatctgaagattgatttgagtcagaggatccggatgaaaaagagggactcaattgtttgttatcattattattatgattcttattattgcttatcctttgttctactaccactcattatcaatagatagttgcccaattcctaaattgaaaaacaaagtgaattaatcttattattataatcccaaaatcagaaagctaatggaatctgcaaacaaatcaaccttaaatttcttctatgtaaattcatgtagcaaataaatttccatttttttggtgtgaaattttcccactgaaaccgccaactgaaaaattgggtgcttcaccacgacgcgtctggttggtggtcaacgtcttttttttttccataatgatttgttcacattgcagtaattaatggattggagtgaatatgtagtcttaagggaaggtgaattgaagataaaatagacaaaataattagtgaaaatgtcaggatttaacctaagtgcaacactcaatgttatgaaactagcagtttctccacaattatgtttacctcatctagtagtatcgacttttaacgatttacccgttccaattcctgcaaatccaacaattaaagcaatcgttctcgataaggataattgttttgctaaggcacatgatgataaagtatggccagaatatcaatctaaatgggattttttacggacacaatatcctggagcacaattgctcattgttagtaattccgctggtacaaatgatgatattgatcacaaacaggcacaaatcttggaagagagaacaggggtaactgtactccgtcatactactaaaaagccaggatgtcatgtggaaatcatgtcatatttcaaaaaacacggtgtttgtgagagatcagatgaagttgctgtggttggagatagattgtttactgatattttaatggcaaatatgatgggagcccgtggttattgggtaagagatggtgtttcccaatcacaatccctgatctgtaagatagagagatggtggtatacgacattcactgataaaaaatagtgtaaagaacaagaatagcagaattttttcaattagctgagccgcgtcatgaaacagggacatattggatttaaataaatcatggatcactaacattacaaattgaaccctaacaattggtaataatatactttactacttttattcttttttctatctctcttatttgatcaacaaaggagtcgtgtaactttccttttgattctttgctatgacaactcgtacattgggtaactttaaaactttacgagaaatacttgattttaacgatagactgaaccaaaatgaaattgaaactcaaattaatgaattaaatgaacgtgtagatgtaatgaatcccaataatcactttttgcgtggttactcaattaagaaaacttccattactagtgtattagattggaatgcagtatattcaaatgataaattattttcatgtattatggtacttttaataactgtagtatcacaattggttttcagttatatttcatttgcattagttaatgttcaacaaaatatggttttgttttattgttgtcagggtttaaatttaattttctcttatcttattccattaactttaattcaagatattgaagaagtttttgaaaatccaacggttcaactagcatcagaaattcatatttataaacagttacgattttgttcttatgttcattctttatgctttgtggtatcattatgtacattggtatatttattcagaaatggaccatttattgaaatgagagttaatatcagagatatggttgaaactccaattgatatgactactttcattcggattttacaattaatatctttccaattaacgtcaataaacttaatattatctttgttgaatctttttttaacgagtagaaaaattagacattgttataataaaattgaaaggctgcaaaatcctcaagatatggatcttatgtttaacgcttccttagttgaaaacagattttctaatgatttattttgaaaaatgtatatttgtaacttatttatagtttacggatatcttacacagctttttatataacctcgatctttactaaaaataagctttttgttacaaataaataattagaataaatgatttataaaatatgatagatgaaataaaataaaataaataaataaataaaatttaataaaataaaatagtaaaataaaataaaactatggataggaataaataaaaaatagataatacaatgaaacacaaaagtttacagatatgccatccagagagtatcggtacttgctaaattacgtggattaactgcatgagtaatcaaattaacaatgtattgacttgaaacagattgtgatgaactatcactagataattgactaattcttttaaccaagtaatcaacattaaatttaacaatttctcttaaattaggtggatcttgtgtgacatatctggttctttgagcataccatgaaaggatatcatccttaataaacaagttcataaaatgctcaatttcatattctggattggacaaacattgagcaataatcatcatatgcatagagaatataccttcagatcctattgggccaattaattcttgaatattcggagttaatctaaatggaactaattctaatgaacaaaacattggagctgctctctgtgcagaaacatctaaattactagtttggaatatattatgtggcgatttacctgcaacgactttatatggtaacatttcagatgtccaaactctacctgagctttgattaatatgaattttttgtggttgtcttgcattaatacataacatgtaagtagaaaatgcaaatgtagcatattgtgagctaaattgcttacggaaaatccagaaatcttcaaatttaggataatagttgaggaaatagttctttaaaactgaatttggaacaaataatgtttgaattgcagataaaatttcagttttaacacttaaaacatctggttttggcagtcttggatcatatgctgtatgtaatttttcaattgtataagctaatggttcatccctgttttgacctttatatttacagtatttttcgtaaatattcaacatattaacatatttgtcatcatcagtcattaatctgatatgtggcgataaaggaattgcacatggtaaagtaaattcaatatttctttttctactttgaacatttttacttaatggatcattaaataatctgaataattgaaatattctctcttctcttctacaatgtcttgcagctggaaattgaatagcaaatttatggagactaccatcgttacctctcattgtaatacgcttgtaaaatgctgtaggacctctaatcatatcaattgtaggcataaatctttcaatcttaacaaaatattggttactttccttatttaacaagtattgaccaggtatttcaatatcttcaaacttttgatgatggaattgactcaaatgtggacaaactctctctaaattgaccttactatatgttctatcaagcttctcttcaagacaatctttccacttccttagtttggaaatgtaagtttccaagtttggttgactcttgattaaatcattttcaaactcttctttaatgtgttttggtagaacagtattagcaaatctaacaatattagcttcggtggctggtggtaatctagcatcttcattaggattgggtaatctattgaaatattgaacaccgtcattataaagtgcaacaactaacctataagcatctccgtctgaatttgatttgaatctttgactgatttgatcaaccaaggattctaaagataaagcaagtaatggatatgatgttttcaaaattcccataatttcatccaggtgaacccaaggtttagcaaaagattgattaatattagaatttaaggaaacgactgaggatccattaggtgggctgcccgctaatggagtaccagcaagtggatttgagttaacattctcagtttgagctttggcatttgctgttcctgctgctccattatctggaagagtagctgaagctgtagtatctgctacagctttaccatctttattgtcaacattggtatttgaggaatccaatttgtcatcatcttcttttttaccatcagttgcaccgccatttgtataagtaacaggattgtttgatgcggctggtgtctggttattaggcaggagtgccagattgtccagattgtccagattcagctaattgttgtctctgtaatacacttgcatcttctctagcagttcttaattggaaatgtaatgattgtgggtattccttggcaattttaattaataccttacgtgcaaaatttgcttctttatgagataaagcagataagagttgtggaataaatgtaatccagtaccaaattggcatatcactttgatgtagattcaaatgattctgtcaaaacaccattatcatcatccaaactaatcaaccataaaattctacataataaacgacgagccttgctattcttatataagcttgtagcttgtaaataacaactgatggcatgtttagcataattaatatcattggactccttaaatcttttatcattgaagaaaccccattcagcccatgcctttggtaaattcaaatccaattgaacggcagttgcaaaagcttgattggcttcatcgggtgcattaagtttcgccaaaaacataccttttagtgtgatgaattcagctttttgttgagcggcaaagtaaaccaaattagtattagaaataacatctaaaccggtattaagttctgcaggattttgataatggcatttagcttgttctcttaatttcaaaaatgcttcttgaatttcaatatttggtaaggtgtaaattttagttaattgattaatacagacatctggcatattatgttttctagcaacgtgagcaaatctgttgataacccaagcaatttcatgatagcctcggaaagcatatgagttgttattattattggtttgttgaatagtaggaatcaatggaatatagactttattgatgacttcaaatgagtgttttctccaggtcactaaatcattccaaatgttaatatcatcccaagtgtttggcatacgttctctccatgcttgtaagactcttttcaaatcttgtgatttcatgtccaagttttcagcagttgttgaacttaaacttctataaacttgtgttgcttccataaactcaacatattgttgaaaactatgtaagagtggaatatgtgcattggttactctttgtggtaaagtgtaccattttttcaaagataattgtataccttcatcaacttgtctagtcacattttgaatagtttctgaattatgagcataaccttgtaagctgaggaaagcattaaacatttgtcttctaggtgtaggaacatctaaaacagttttgatagattgttcaagtggttctctatcagtaatccaatcagccactctccaaccacattctaataataaatcagtgaaaaccttcattctttgcaagcttctgttaaaatatcccagcattgtaatttttcagcacataagatccagttatcttcccataaagcatattcactctcactgtaaggtaagatactacttctagctttgacctgtgcagtttcataaagtttcatagcacgatcccagaggccaatctgttcgtatgataatgcagcattagtttcaaaatacttagaacgtctacgccataaaccataaaacatatctgtttcttgtaagttggcataaagctctactaaagcatccttatttgtttctttaattttggagttttcagttaatggatttgattcaatttgttctaaaattctaacactggagtaccatgtgtcataattaatacccaaatactttactaagtgtggaggaagttgtaaatccgtacattttccagcagcagtaagcatggtgttaataacattaggttttccttcttgttgtcttgtgtggtaatcttttgataataatgtaacaaatgcatataagaagtcggacttttctttttgctcaattgaattgtaaacaatagggaataaagtgcaccatgaattatggatggcttcaggactttgatataaaagatccaataatggaactaaaaggtcagaactcttcaccttaattttatcatttaaaaatttctcgtgtttggataaaaggtctgaaatactagatgttgtttcttcaatcttggtatcaagtggaacatcataaatttctgttagtttagctaaagtattctcattttcagtcaatcttaaattataattcatatcaaatgatccatataaaatctgagaagcttgatttagccatggatattctgataaatactcccaattttgttccctaataatataaaataatcttgttttaatatctttatccaacgaattattcaaaattgaaatcaaatcttgtctaatcttaacatcagatattttagtaccaaccagaaatggatgttctaatctaaaagtaagctcactgtgaatttaatgattcatctttgaaaatgtccatgatgatctgatagtacattttggtcaattcagaagtcacccttcagttcataaatcatcatttttgaaagaacacctgctttttcctttacggtaggaacagttgatgaagagtttgaaaacaaccaacttcttacaatattcacaattgtggttaaaatatccctgtcaacagatttatcaattaactgaactaagacagataagtaaattcttctttggtcacccaacgccaacatacgctcagagccaaaatttaatatcttttccaccaatttagtagtcattttagcttcatattctgtaccattcggattttcaccattcagtttatgtttaccgtgagatgaaagagtaacatgatccttgactaattttcccagtgtttttaagattaattgaatgtgaggatctagtaattctggtttgtacttagcaacgctagataataaaagaacgccagcagcgactgtattcattgcagttaaatcttctgcaaccacagaaaccaaaaagttcatgaactttgtacagtcattttcaggagcatcttcatcgacgatgctagtttcctcgatttgtactgcctgtaagattaacaataaaacactttgtaaagcctcttggatatcatgattgtttgatttgatacacttttccaataaagtttgaagttctgcaatgttagcaacaatccaatctgaggttttccactctaaattgatgtccaatacctctaaagcatttaaacaataaaccaacatgttgctgacattagaatctgaatttaccaaaaacttttcaaaaaatgaaagtttaacattgacgtcaggccaaaagccaggagattgaatgatatgtaaaatattaagagaacgacgacctagctcattttcagaagctctttgagaacagatacaaacgtaacgaatcaaaaatgtaatataagtttcccttaatccaaatggaactgagtaagaggaaaccatgaccttttcttgagcttcatttttagggactcttggttcatcaacttccatttcatctgaattattgtcattatcagcttgttcgggttttttagtttcatgattctcatctttttcatcttttgcattatcatcatcagcagaattaacattatctgcgttatcaacatccatcttatcagaatcatcggcaccatcagcttttccaggaacaacagcgttctcaacagaatgtgatgaactatctttgacagttgattgtttaccattctcaacctttggaacttcagattcttctttacttttgacttcccagtttaatattaactctgctaaatcgattgctaacatttggttttcatttgctgagttatttacaacagttaattttcccattgcaccaataatatttggaatgaactgatctcttgaagaatagaataagtctgggtgactaacaataaattgataaatattggaaacatgactaacagaatatccatcttcagacaaaactcttctggtccaatttaaccattcagtattaccatcaagtttatcattcaaaaatggtgctaataaatcaatcgattgtctaaccataaatctaatatcattttgatttgctttcaataatgcaacaaacacttgtataacaactttctttggagtatcaaatgctctaataaaatagacgattgaaatataagcagcttgtttggaaatactatcttccaaactgatgaagctccaattgaatttgatgatttcttttttccacttgattattaagtcagaatactcagagagtaataatgatgttaactgtaataattcaactctaaatttatcaaccatacaggattcaatcttagatgattcttcaacaatccaaaatgtattagctaaagtgcttaaccagtttgcaggatcttcaccaacttttgcaagttctttagttttaccaactttggcattatagtaacaaagtggaattgcaatctttttaagtaaatatattttagtagacaattggcgggatttatcagaaacaaaattcataatttcatcaaggtaacgtctagcgatttcaagattttcagttttaataatatcttccaaaacaaattttgaaacattctcagtgacttgaattttatttaaacaaattatatccaataatgtgatggtattagctaaagattttttgttgagttttaaataattaacataaattctttcatatttttcaactgattgtggaagttggaaatgaattggagatgatattggtgaggatttttcatattctatccattcaatcattaatgagctagtttgttttaaaataggttcgcaggttgaataccagtttgaatcataaacagacagcatctcaattgagtcaataaaattggttaacatgatatacttggtatctttattttgttctttattaattaaatccataaaatcatcaacatgtttcttaaattcgtttcttaaattctcgcaatcctctgatccaataaagtaagcaaatatggatccataatttctaaatactaaatgttccttcataaactcaatagattgatctgaaaaacgattcaaaaattgtgcaattggttttctgaatggtgagttataatgacgacgtaagttgctttcaagaaataataaagtttcaatcatttctttgaggaaagtatgtgcttgtggtggtaataaatggaaaattttaagaatagaaacaattatttgaattgtattgttactatcaagttcttgtaaagaagctctttgcaaaactgaaggttgagcccatgccataagatgatctaataattttctaccaatttcgactttaaaatatgaaatgagaagttcaagtaatttagatagtgcttccagacctggagcggtcagtttcttgtaatcagataaattcatcaacattggacgtaatccactttgtaataattcctttggtaattttgaattttgtgaaagaacttgtttcaaacctaaatatgcagcattaataattttagagctacttgaacatagcgttttaaagaaaacacttaggattctaattctaacttgactattcgaaaattcctttttagccagtgccaaggccaataactcaatgcatacaattcttaaatcaattaattgcttggatgtggtatattccgcaatattgttggagtttatcaatgattcatcatctgcatcaaccagtgccattgcttctgatagtaatctattgagttcatcattgaattctaaaaatgtatcttccaaacctaagcaaaatgtgattgcatcaatattaccaatttgcatatgaaatggcaatgctctcaatggtttaccaaaaattggagccaataaaatacctttacttggtgaaatcatttttgcaattggaacagaagtaacttctgataaaattttaatagcttccttggctgtttctctaacattattgttagaattacttaaatcaaaaacaatttgactgacaatagattggaaagattgttggaaaacttgatcctttgaaacttctttattacaattttttaatatacccaaaataatatctttagcaactgtgcaaacttcagcaggaacatcatctggtgtatctctcaaaacaaaaaacatagctcttgaaatttcaatctgtctaacagcaaaataatttggagaaattcctaaatcattaatcattgtttgcaaacctaaacaaccacccaatttatcataatatttatcttcaaaacaattatgaataaaagtggagcacattcttctaatagccataaattttaatgcattgtcaacagaaccaaaaagcgtgacacatgtattgaaaattgccttgatagcaaatttacctgcatctcggatatcagacatataatgacttaaagcataggaaatagcttcataaatagtgtttgcgttcaaatacttgataccttcatggttagcaatggaaaattgtctggataatttgttatgttcgagcattgctttacttaaactcaataaaacataatgttgacaaataccttcaattaatgcataagattcaacttttgcatcttcgattgaaacggaaaaaaataatgcttttaataatctaacaagtaattcctcttgtttttcaaccttttcatgatctttcgagtcatctaatggtaaactaatactattatgaacaataggaactttaccatctttaataataaaatcaacaacttgttcaaccttctcttgataattttcaggaattccatcagtactaatcattaattttaagattgtcattagatagttattagcactcattctataatggtttttataacggaaactttctaatgtaagaaatgcagtgttcattgctgatgtaatagatataggtatatcaccttttaaaccctcaattttgaaaaatgcttctaatttttgatctgttaacgtttcagatgtaagatctctatgtaaattcatgaaacttctgtttctaccacctaatttacctaaaattctcaatgttgtatgtgaatgttgatgataatatggtaaaggctttaaatgtttccaaagtgctttcataatatcttcaatgactggttctataattggatcaaaataatcagcggttaaattatcaacgcataactctaatgttcttaaaccttgagttattaaatcttggttaccatttaatgcaaatactaaaggtttcatcaaaaagcttaaatatggaaccaaaacacttaatctaaccggaactgttaaacataattcaacgtaaatatccctttcatgtgaacgacgtgagctttcaattaatctattgagagattcaagtaaaacttgtaacaatggtaatatttctttgtaaagtgattcaaatctaccacctccaatacttctgaacagagttctaatcaaataaaagtaaattattggttctttcgttttcattgaatatttcaaacaatctaaaatcagcttattaagatgaggtaagataacattttcattaacatttgggaataaattcactgacatgaaacataatttgaataatctgatcaaaatatttgatttcactatatccatatcacctaattcgtttaatttagagataacaaatacaatcaatgtacttgaaatattagatgttgtaatttcacttgctaaaaaaaattgtggaatgtggagtaaagctggattttgtaaagttaattcaaacaatgctggtaattgctgttgcataatttcattaaaagctgcaggttctaaatatataaagatggttgctaaaatttccatcaaatctttttcttcctttgaggaggttataggtaagttaggaccagtaatatcaaatgattgttttaatgttgatgtaatagcagtaattttagaactttggaaaaacttcaatccaccaatggattctttaaataatttttgaaaaatgtttaattcctcgattgaggttaaacgagcactttcttgccaaacttgtggaggataatcctttgggggttgtgtattacaacttttaaatccaaaacaaatagatttaaggaaagtcattaaggttctaaataaataacgtgcactttctaatggatcttgagtttgtggttgaatgatttgaattggtaagtttctttcaatttcagcataagatatattggttactaaatcagtttcttctgttttttcagtagttgattcgtttggtttatcatctaagtgaagtttttcagataagtttctaatatgataattttcgtcaattgattttccagtcaatgttttaccaaaagtttctaatttttgtaatttcaatgcacgttcttttctactatttttgaattcatcgtgttgtttcataatattattgtattgtgaattcaatgatgcaaaccttcttccaaatgtatcaattattaataataagatttgtcgtgagtcagacttattttccaattttaaaattctatccattaaatttaacaataatttggcactcattatatgaacagtttgtgctaatgtatcatcttgtaaatatccactatatgtttttacactcttccaaatttgatctattgtcaatgacgtgttaacgtgtataaaatctgcaactatagaatatgcaagaggtcttaaagtttcatgtgcagttaaaccatcaccaataagtatattgtcatcaaatagtaaatcgatcttaggaacaaataaagttcttaaattagttgatagaacgtgtctggtagcatgtagtagttctcttctagcagttgataattctcttggacaatcttgtaaaagtcttataatcaaatctggaatttcttgttggtattgttctatattcgttgaagaattttttctgataaaaatgtaagccatgaatgatgatgctttgacttgagcaaagttgaaatcattatatattggatttttgtgtaaagatggagcaattttaacaatatttgtatttgcttcctttgatttttcatgttcaagtttttgagctggagcttgtaattttaaaacatcaatgacaagtggtaaaatagttgaaacagatgtatctaataaagtcttgtaagttccagataatgaaacaagagtaatgggacattcagctgccattttaaaagagtgtgttgctttaaataatgtttgttgtgaaacagaatcatcatttgttgtaaaatcagtgaatgatgaaacagtattatttggtttttccaattcatctgctttttcagtattttcagttttagtttcatctggtttatctgaaacgactatcttttcaacttcttcgctgacttcatttgtatctgatttttcttcagttttaaaatcatctttggaatctgattttgcatcttcattgaatggttgagaagctgtatttgaatcacctttatttaaactgaattgttcatcaacaagagttgttaaattagaataaattgctttaagaatacttaaataatcttcaacttttgatgaaagataattcttataagatttatgtaaagaagttataattttcatacattgtaaaccattttcttcattgtcaatttttaaaagttccattaaactatcacaaactctaacagcataagggtggaaagtttcattatatggtaatctatgaataatatcaagaatcaaatatcttaatttttgttcggctgaatttgagataaatgaaattggaattgtatttaaatgattgaaaaatatatcaatcataacttttaggaaatactcatattcttttgcaccatgatgtgtttctaaagtatcacaaagttcagaaaataaagtatgtttaagttgtaaatccaacgatgcgtcttgaagcttttgaacaaatgcatcaagatgttcagtataggacgacatttttagtactattggattctgataattaacctaaataaaatttgaatgtttgactttagaactaattatcttttaaaatgtgtctatatgtagatacttttggtatttaatgcagaaggaagggatataaaggatatatttaatgggaagcaaagattataaacaattaattaaaaacagtagaaaacattgaaaatccatgttgtgaaaattcatattatacttcacgtaattcagattttttttccttgagggggggatacttcatcaaaattttcaaatttgatcacgtgacgtggtttttgcggtgggacctatttggccttgattgatcaggtgtgcttcccatagtcgtgaatagtcgtataacaaggagtggaagtcactattagagacttttttggttgatgtcgtaccttcaaacaaaatattccaataataacttggtggttgatataaagctggactttgttcacttgttggtgcagtttgatcagaaaaagagtatggttgtggtaaagcgagtttaggttggttttccttattaccttgtgatgaaagagttgcagaatttgaatcatagattacagaatttggtgagatatcaagtggaaaatatcttttacttttatatgggattttagaaagtggtactcttaatgagctagtcttgaaggtgaattcttcattctcagatttggctcccactattttactgttacttttaatactgatatttctacttttaggtacaatttcattatcatttgaaatggatcttttggagaaaatgccgcctctatttgagagtcgagttttccctagcttcatggaaggtggatatttaaaagttgaacttgttgatgatttattgttcatcatatttctttttggtcttggagaatcttgatatatgctaaaatcactcatcataggcttatttggtgccattgactttttttcagtataatttggtatatcagttgtggtctctttattggatgtaacgttcttttttatatgttttaaagcatctttataagtttccaaccattcagtagactctttaggttcattttgtacaacaatatttgactttttgagattatgatttagttcatctacagtatttgtttttgcttttgctttatcaaaaatatcttcaaccgattcagcttctggaccagtggttaacgacaacctttttaatgtatcaataaatgtttcggtctctctttgtttcttgatttacaaatttgatagtagtaccattcaaatcatttgatgtatcaggtgtgggttcaattttatttgaaaaagtattgtaatctatctcacctgattttagaaaccattttcccattttaggtacataagagtttaagtattttctatctagggaagaggtatttgtcgattctgtatttgaaatactggatgaatctaataaattactacttgtctcaccggaactcaatttaggattacaaaacatactttcggtaaaagtttcggatatggtatgtggtgttagtaaatttgtagttttagccattggtatgacttttgatacgatttcttcgtacgatttacctacgtcacctttattagataatacaatatcgttaactagatccggaaaggagaaatctggttcattaatttgcttttctttgacaatattgtatacaaactcaataacagcttgaaatgatttgttgatacgacttttacaaatatcatcatcatcatcatcatcatcacaactttcaaatgcttcaatctctaaatcgattttcctctgatttactaagtctataaaaggtctcagaataggatccaagagtggatcttgatctacctcatttgctgccattaattataattactttttaagctaataatgaaacaaatattcaaataaaaaagagttcggcagttgctcccattctataaagaaatattccaagttgccctactttataatagtttactccgaaatccgagattttaacatcatgcgccacaataatagcaatcatgcgccaccaacattcaaaatttgaggaaaaaaaaatatttcacttttcacacttcacattaatctttacatcaaatttttttttttgaaattttccattgattcttagggaatattcgattgtatcgtaaaatttgttttcattgaacaattaagcaataaaacaatatgggtaaagctaagaaaacaagaaaggtctcggtgaaaagaatggtcaaaaaggatgatcaaagaataaagaaaaatatggataaaccaaaagaggtagaggaagataaagaattagttaaatcagttccacaagtttcatctgcattatttttccaatttaatcaagcaattaaacctccatatcaaattataattgatacaaatttctttaattttagtattcaaaagaaaattgatatagttagaggtatgatggattgtttattagcaaaatgtataccaatggttacagattgtgttctagcagaattagagaaattaggtcatcgttatagaattgctttaacattagcaaaagatccaagaattcaaagattaaaatgttctcataaaggtacttatgcagatgattgtatcgtaagtagagttattcaaaataaatgttatataattgcaactaacgatgctgatttaaagagaagaattaggaaagtacctggtatcccaataatgagtgttggtggtcattcatacgtaattgaaagattacctgatgtcttttaaattctccttgctatgtccttatatatttgtgcatgtataatacctttttccaataagtactattaataaatttgtaatactggtctttaaatcatctatatgaatatctgtttatgtattaaccctgcatatcgtttgatttactaataggattggaattaaggatcagatttggcattgattcgctacgtaataacacatctcttaaatttcaaccttttggttttatatctcttaatccatcatactcttcttcaagcaacaaatgactagtgatgataactggaaccctgatgaaaaatcagatgtaggggatttgaataatttcaccaatgttgcaaatcccgtaaatccacctaattcatcatccaattcgaatgttcaaaataaatcaacgccaccaccacctccgccaccacgtcatacaactgatactaatattataccaaatgcaccacccgaatatgtatcattcaacgacgatggattcagtaatgatactggtatgaatattaatttagataaggatataagggataaaatatctcgatttagtaattatggtcaaggtacaatgacttatgatgataattcagaaactccatattattcatacaatgataatgacaatgtaaatactcttgatcaaccaacggaagactatgaaagaaaatatgaagagaactacatttataatgaaaataaagttgatatttatacagacattgaaaaaatgattaaaactagttcccttggtatagataatatagatgaagataatgaagaacaagatgacaaagatgtaagcgttttattaccattacgatatgatttatatgaatcatattttgcaccattattaatgattttttctcaaattcctgaattttctaatataattttacatcatgaatatttaacacttcccatataaacctaattggtggaatcgtgaattatgttctgaaaatccattatttgtgcaagaattacaaagattagttgcattcctcaatggagattctaaaagaagatttgcttcactttttaatctaattaaaccatttgaaaaattagttaaagatgaatttgaatcaattgatgaatttgttggttttgcaataaatgaaattgttgaattaatttcatcaattgagtatagttcaaaagatccaattaaacaggttatttgcttcaacatgtatacaaaataatgacttagctaataaacgtgatatttacgatataccatttaatagtgatgaattatgctataatagtttatcaaacggtttataataaattgaatacggatgaagatgttgtttatttgagtaatgtttccgatatattgacattttcatttgaatcagatactaaaaccatagaagaaggattttcattagatgaatttatatttccacaaatttttttgtatgaaaatagagatgttttcatgtcaatagataataaaattgaagagttaaggatgaaaaataaagaattgctggataaatcatttaaaatgagagcatttaatggtaagagtattcgtggtatattaactgaaaccaaaaaatatttacataagtgaatcagagaaacttaaagtgttaaaagatggtgataatgatgatgatactgagatgaaagatgcagattccactaataaatcaactgaattgaaagattatgaaaaatatgaatctgctagtgaaaatattggattcattagcaacaaatatacaacagcttataacacaaataactgaagagactaataacatacaaagaaatatatctaatttaaaatcaaaaaaatttgaaattgatgaaatacttaatgaagaacaaaaatctacatttgaaccatggatattaacaggtataattattaatccagcagtgttttgttacagagagaaaaaatcaaataattggataagtgttggaattaatcaagatacatgtaaagattattatacttcagaaattgaattaagtgaaattcaacaaatgatgcaagaatatacatcaaagaatctagatgatggatttattttgacatatgttagaaaatctgttttctttgattgtgaatttaatccattgaataagttattagaggaattcatcaacaaagataatgcacatttacagaagcagtttgactatcatgaaaggtggtgtatagagagtaatattatgtaagataaaactgtattacgtaatatatttctaaataaagactaaatcgacccggcgcttactgtaattggcatttgaaaattttacaccagtgcaccgggttatattttaaacattaacaataaaaaaggaagtggcacaactatcgtggtgtcagggtacatgttagttatgccaacattactaggggtgaaagtgaggaaaataacgtaattcaataaatagtaataggaaaaacagccttctaatgggttctattccaaattttcaattactgagggaatattcgttaaatttttcatgatgttgtaacattggtggattttatgatatattttcaatttagagtatagaattagatttttcaacttatttttcacttaattaatcagataaagatggcttcacgtgtatttgctaatagcattaagaaccttcaacagattatctgttgcaagtgtttctagaattgcaccaagaactgctgttagatttgcatcatttgatagatctaaacctcatgttaatattggtacaattggtcatgttgatcatggtaaaactactttaactgctgcaattactaaagttttatctgaaaatggtggtgcagatttccttgattatgcagctattgataaagcaccagaagagagagcaagaggtattacaatttctactgctcatgttgaatatgaaactgcaaatagacattattcacatgttgattgtccaggacatcaagattatattaaaaatatgattactggtgcagctcaaatggatggtgcaattattgttgttgcagcaactgatggtcaaatgcctcaaactaaagaacatttattattagcaagacaagttggtgttcaacatttagttgttttcgttaataaatgtgatacaattgatgatccagaaatgttagaattagttgaaatggaaatgagagaattattatctgaatatggttttgatggtgataatacaccagttattatgggttctgcattaatggcattagaagataaaaaacctgaagttggtaaagattcaattcttaaattaatggaatctgttgatagttggattccaactcctcaaagagatttagaaaaaccattccttttaccaattgatgaagttttctcaatttctggtagaggtaccgttgtttcaggtactgttgaaagaggtactttaaagaagggtgaagaagttgaaattgttggtggtaaagatggtgcattaaagacaactgttacaggtattgaaatgtatcataaagaattagatcaagcacaagcaggtgatactccaggtattttattaagaggtgttaaaagagaacaaattaagagaggtcaaattttagcaaagccaggttctgttaaagcttataaacaattcttagcttcattatatattttaactaaggaagaaggtggtagacatacaccattctctgaaaattatagaccacaaatgtacattagaactactaatgttaatgttaccttaaaattcccagaaactgaagaagatcattctaaacaagttgcaccaggtgataatattgaaatgattgttgaattattataccctgttgtcttagaagttggacaaagattcaatttaagagaatctggtaaaactgttggtactggtatgattactagagtttacgaagagtaaatcaattgttagtactattggtaattaatattaaattaattcatttaagtttataataaatatcatgtttatagttcaaatttattaacttattattctgtttttacgtaatactagaaagtttattattacgtaatcgtgaaaaaaaatgacattggatgtagatatcggatgttgagaattttacggtgataagagactattaactccacaccttaaacccttgaaaaaaaaagggttcgcgaagaggagaaaaaaggcttagtcaaagatgggggagaagtcttgattattagtttttcctgggggaattagtatagttttgaattccggggtaatactcgtttccccaatcctaatttgaagcaatcatgcacaaatttatatttctgacatgattattagtaattttcataaattttatttaacgaaaatatatttggttgtttcaaatggtcccgggtaatgaataagaccatatcaaagttattttataaatacttgataaatttttatgactaagcagtaaaagataaactcttagagcatttaccccaggtgtaaaataaaaatcgtactagtattaaaaccattgataatgccttagatataaaaaattgggggagaattaaaaaatagcaaagaccggaaacaaaaaatagaaaaaaaataaaaaaataaaaaaataaaaaaatgtaaaaaagaaaagtggaaaaaaggaaaaaaggaaaaaaggaaaaatagttctcgcccgctaaaaaattctctttgttcgtgtatagtgtatccaattggctgtaaataataaatttgtgggttagtaaaacttttaggttaaagttttcccctcaaaaaaaaaaattagagtgcgttgaataggctacagtcttttaaatggggatagatattatacaaggagaaatatatacgtatgaagacggatgagcacaacgttacagagtatattttttagcggagattactgataataatgtataaatggtatgttcttgttattactaaaggagatagtaatttaatctagagataccaaatgaaactggaaataaaaagcaacatgattattaagaaacaccccataatttttaatttttaaaaaataaacactgttttaaacgacgaaaagtggggtttttccgattttccggatttgaaagcagaaatttatagtgtgcggattaatatttattgggtgattttgagaaaactatgatgaaatgcttacaaaacacggaaaaaataggaaaattattgcgaaaacaacgccgttccacgcttttcctgtttctttttaaatgacttttattgttttttttccagtctctcactttaactcggatgacagaaaagagaggtctccatttctactatttaacttttttttcctgttttcattctgtttatcctataaattaaactactttcccacatttttcattttccccaacttctccatttctgtttcttttccttttatccctctctcttttatttcttttaacatcaaacaaacaaaaaaaactcttacttataattaaattaaatatttctaaagatgtcatctcattcatctattggaaaattatctcaccaatcttttgctggtgatcatacaaacactccagaagaacaacaaccagaagttgttgatcaaaatcaagatgccccaattattcctgatgaaccaaacgctaaatatattgttgctgcaagtcttatgtttattaattgcattcggtggtttcgtctttggttgggatactggtactatttcaggtttcgttaatatgcctgttttcattgacactttcggtcaaattaatagtgaaggtgttcgttatttatcaaaggctagaactggtttaatggtttctattttcaatatcggttgtgcaattggtggtattactttaggtaaaactgctgatatttatggtagaaagaaaggtttaatgattactatggttgtctatattgttggtattgtcattcaaattgcttctgttaaatcttgggttcaatatttattggtagaattatttccggtttggctgttggttctatttctgttttagctccaatgtttatttctgaaacttctccaaaggcaattagaggttctttagtctcaatgtatcaattaatgattactttaggtatcttcttaggttattgtactacttatggtactttccacggttatgatgattcaagacaatggagaattccattaggtttatcttttgcttgggctttattaatgattcttggtatggttttcactccagaatctccaagatttttaattgaagttggtagacttgatgaagcaagacaatctttagcatctgttaacaaacaagcaattgatagtacttttgttactcatgaattagaaactttagttagtgcaattgaatatgaacaagctgaaggtaatgcaagttggggtgaattatttactggtcaaccaaagattttctacagattaatcgttggtgtcgttttacaatcactgcaacaattaactggtaataattatttcttctattatggtactactattttccaatctgttggtttagaagattcatttgaaacttcaattgttttaggtgttattaactttgcttccactttccttgctttatgggttgttgaccgttttggtagaagaaagactttaatgggtggttctactggtatgttattatgtttagtcattttcgcttcaattggtgttaagaacttatatgttgatggttatggtagtgaatcaagaaaaccagttggtgatgctatgattttcttagcttgtttcttcatcttttctttgcaactacttggggtccatgtgtcttcgtcgttgtctctgaaacttatccattaagaattagatcaaagggtatggctattgcaactgcagcaaactggatttggggtttcttaattgctttcttcactccatttattactgatgctattcattttgcttacggttatgtcttcttcggttgtgttgttttctcattattctttgtctttgcatttgttccggaaactaaaggtttaagtttagaagatgttgataaactgtaccaaaactataccccaggtttagcttttatgaaaaaattcagtaaaggaactgtcgatgaattagatgctgatactgaaaagaacgcaagttcataatttcaatataccccaataattttacaaatttgtaatgaaaactcttgtttttgtcctcatgaataatgattaaatttatcttcatttacttttaatatataaactatatatgatacatataacttttttaatgattttagcatttactttcttttactttactatatttctatagaaaagaatttaaaaaatcaatctctaatttggtaaacttttaaaaataaaaatagttcgatctaactttatcttatctgaacaatattttctgaaaaataaatcgagtctttccttatcattgatacatgcattatcataccattcggaagtattttgatcaatccatttaacataaacttctctagtaaacttatcaacattagaccccctactattttctctcattgcattcaaactagcttctctaaatccatggaaacatggagttaatgaaacaattatatcaaacatatcaccggaattttcagctagattcattaactcatttgtataaagtgtacattcttttgatggcttaatgttttcaatatattcatctgtaaaaccaagttgtgataaaatattcttatgacgtttgatttcaacaaatgtatcatttaatatctttacactatcctccatttcaataatattatgacttttggaagctaatttcaaaataacattggcatatcgttgtaaataaatataattttgttctgcaaatcttttaaaattatcaagtggtaacttaaaattataaaccattttcatgaaattatgattcgtatagctgttccaatgatctttcacctctggatggttcactaaatattctagtgcttcaccagttttaaatggtaactcgaatttactggatgacatataattgtattgtttcatgttttggatgtgatttagtggcccgtgcccatttccaatattaggagctgtctttataccattctgtacgtagacaataccatttgcaacagagtttataattgataaaccatttgacaagttagatgcaatggcagatgataaagtacatcctgtaccatgtgtatttttagaatttatcatttcagatttaaatactgtaaatgaattactatctgaacaatatagtacatcagttaataaatttgaatctttccagttttgatgtccacctttgattaagatgttactaatgcctgtcctggcgtatattttcaaacacatatcataaatttcttcaattttatcaatatcattacttttatcatataatttttggtcatataaagtattcagcagacactttgcttcaaccatgttcggagtcaacaatgttatgaatggggataaggtttcaatcaataattttaatactgaattgtttataaaatcaaatcctgatgtactaaccataacaggatcagcaactaaataacctttatattcaaattgtagaatagcatttttcaattccacaattgcatcttcagtcaataatcctgtttttattgcacaaattgaaatatccgtaaagttttcacttaacatatttttaatcatttctttcgtagttggagctgcattaataacacccattgtattctgtgccgttaaagatacaatcgtagtcaatgcataacatttatgtgcactaattgtcttaatatctgcctcaattccggcacccccggaagaatctgatcctgcaactgttagtaccgtattcaatttatttgactctgatattggtgtaattgactcgttatatgaatcatcataaagatgaatttctctagttgtatatttaacatccataattggatcaattgtacacgatgtatgtgattaaagaaataaatcaataacattaatgaatcgtcgatcaaaattttattaccgagtcacatgtcgaattttcaacatgtgtctgtgaagactctgctgttacttaataatatattaatccgcaattttcaacaaatgttacactgtaaaatataattacatcttttcttttggcaaagatgacaattgataaatctaaaattgattattcgttatatttagtcaccaacaatgagatggttcctgagggactagatatttatactcaagttgaaaaatcattgaaaaacggcgttactattgtccaattaagagaaaaagacttggatactggtgaatttatcaaaagagcagaaaaaatacatcaactaacaaagaagtacaatgttccacttataattaatgatcgtattgatgttgcattagcaattgacgctgaaggtgttcatgttggtcaagatgatatggacccggcattagttagaaaaatgattggaaatgataaaattttaggtgtaagtacacgttgtgaagaagaattaatgggtgttattaactcagaagcgttaattgattacgttggtattggaacagtgtattccacaaagactaagaatgttaaaagaccgccattgaatattggtggtctccaaaatttactgaagttcatctcagaacgtaaaccgcaattaagaagtgtcatcatcggtgggcttaacaaaaccaacattccaatcacgttagctaattgtgcatacaaaggttttaacactgatggtgtagctgttgtctcttgtattatggcccaatcggatgctgcattggaaacaaaagaaactttaatagcagttaaattaggttttggaaaagtcactcctggatatagacacaatgaatcaaaagtttccatggttcattttataaccaatggtgttgttaaaaacatgtctgcaaatgtttgtattgcagttggtggctcaccaatcatgtctgaactttcagaagaattcgatgagtttgcaaaatttcctaatatcggacttgttttaaatacaggtactccaacatcttcaactgttgatatgtatattgatgcaattaaggcatataataagaatatgagaccaatagtttatgatcctgtgggatgtggtgcaagtaaggctagacgtgatataatgaataaacttttgaatgttggttctttcactgttattaagggaaatatgtctgagatatgttgtgttgccggagttgatggtagtagtatgcgtggtgtggattcaactatggatttagatatcgaaagttctgttgaaatcttgtctaaattggcaagagagagaaagtgtgtggtagttatgaccggtaaaattgatatcattgttgatggtattacaccaagggaaacattaaattattgtataataaaagggggtgatgactacatgtcaaaaataactggctctgggtgctcacttggtggtgtcattgcaactctaatatcatcaacttcctatttcaatgcatatgaagcaacaatacgagcagtttctatgtataaagaagccggttttattgcatcaaagcaaagtaaaggacctggaagttttaatgttaatttcattgatgctctttatgaaatttcaaagagtaaagaatttagttcaacaactatatcacgttattagttaaatgtttatataaaaatcatttcacaaaagctagtgtacaaaaaagaataatattaatattgatcaactagaaaggaagttttgtttgatttttactaaactttttggaagttttagcagaactccgaccttttttgagtaatttttcaccataactttcttcaaactctttatttagttttgtttctaacgccatggctaaatggaaatctttgtgtgtttgaaaatcttcagatggtataaattcatcacaatcgggacattttgtatttgtaatatcacttgatgtttcctctgatggtagattttcatcagagttattcaaagtacttgattgatcggatgaaggtttcttctctgtaaggagagtatctatagtatattttttctttttgggtataggtaatggtgggaagtgaagatggtacatttctttcaacatctgctggatcaagttttcttttctgtactgttgacatcaaatcatctaatgtattaaaagatgttaaatcaacaaatgttgagctagttaatgatgcattgataataggatacattgaagaatttccccataatttttccaaatttcgtagcaaatctcttgaaagtgtatgaaacagttctcttaactgattgtaatcttttggtggttgactaattgtacattgttttgaatgacgaactccagttgcagatgttgcacctaatgttaatttcacaggccgtaatgttgtattgttttcctcatcaatatcttgaatacgcaaaatcagttcaccaatgaaaacatttatccatggtagtaagtcattagtattgcaaacagatttacctctaaaatttttatttgcacccatagttttaatttgttctttttcagttataggatcgtataattcaccacgtacgattttgaaaattttgttagctaattcaatattattatctaacagtttcgccagttcgactggagttttatagtttttactaattgaagatattgacatttcacctaattgttcactgatataattaccagttttaccaccaaatgaccaaaaatctgataatttaaaatgttttaagaaattaggtattgcatcattccttataattgtttgttgatcaggttttttgaaaccactagcaagttttgcaatagttttaaccctgcctatcccacctgaagttttataacctaaaattttctctacttttttcctcaaatcaaaacatatcattgatccaattagagttactaaatcatcccaatcttctaccaaaaaattaatgttacttttctcttcactatcatcaattatagcaggctcgggttctaaatcatcagatttatttataataaaacctttataattaattgaatcgggtatactatccaatttaggtaattcatctgttctatccttcataccatctaataaagatgggaaaagttcgataattttagcaaatattaacctacctaaatccataaaactttcatcaacacttgccttttccactaaatcacaattttcacggaaaatatttaaaactttctttccctctcttcgataaggatccaatgagactttatgattaattggacttggtacgtagtctacatatttccataatggttcaccctttttgaaaacagcagtatgagctggaatcaaatggggacattttaatttagcttgttctaaacgatccattctcgtaatcccataatcacgagccgcataagaaactgcaataagagcattccattgaacacaaactactggatctgattcagccaaacccaatcttaactgttcacattgagcgaagaaacgcgttaagatcaatgtgacaaatgagagataatggacttgcatatgatttatccctatcattaagatcaagtaaatccttgtaagtaaatttagagtgatccctaaatcgcacagttaccattaattgaactataacacacaatctaattaatagttgcctttataggaaataaagaaacgccatcgaaaaaggcagaaacatgtagcgcaccattcaaagagaaaccctctctttcttaaaatttcttagcgaagtgaaaaaagtttttcttagaaatatcatcacttgcactataaattgaattgctattccttccagcactacctttaacagctttatctgatgatttgctctttatctaacagatcttggcttctccttggggaggtctggggatactattattattactattactactttttctgttaatttattatattcaacgttttactgtgatgaccaactgtcgccccaaacggaactacatgaccgattcgactaagccaaacactgaaaattctgatcgtatacgttgtttatttaactatttcttttaactattgcacaaacacattcttaggagtaccagagaatgttatttgttcttatttgtaatttattggaatatttcaaaaaataaaaattctgtaaaacccgtttcctctaatgattaaacattttgtatttccatgctaatcatgacaaggtatttataccgcaagattaaaacaatccggatactttctgaagagaaatgggtatagtatactcctattgcttaaagctatactcttcaaaatccacaaaattattattgctataataaaatctcgtgtaagatatagagtttcaatgttattgttttcattcatctttcggtaaagacacctcaatatctctcttttcaaattatattatcagttacatatagaactacaactaccatgggtgaagatgcaactataagcttgtttgatctctactttcccttaccttatcgagttttaatgctagtcaatttaggtttgcttatgtggcatctgaatttactggcatgtaaaatattcaaaattgatatacttatggtattgaagatatctcaacaggaacttacgctctctaaactactctatcgaagtaagaaacgtttattgaatgtttcattagtcaattcagtgaattattttatttatttatttttagttgctaatgaaataacattaacagtatctgaatggttcccattatttggtataatatttactttcatcattttactgaaaaatgatccatcatatgaatctgctagattaaatcagacaattaagagagttgtaagaggtgatattgatgtatctattagaaataatgatattttacttactgatactttcacttcttataataaagttttagttgatttttttatttacatatcagcattgatattaggtatgcaaacattaccaaatggttctgatttatcaaaggaattatccaaaaatcatttacaattttacaactttgatgtccttctagctaatttcccgtcatttttaagattaaaagcaatgtttgaaagaatttaatcttagtaataaacaaagtatgcaacatttattcaatgcaatcaaatattcaactgctttcctcccaacaatttcaatcattttgttcaaatctggtatcttaaaatctcaatcattatggtattttacaacattcattaattcatcctattcagttttactgggatatcacaaatgactggaatttcggatttttctctagattcttatcctccaaatcaaacgttaaaatattgagaaataaactgttatacaataaacccgtctattacttagcaatcattattgactttcaattgagattcctttggttttataaattaatctacctaacttcgtcatcaccttcaaaacctgaaaatatcaatagttttgcaaactttattaccattttattcactactgagtttggtaattttttgttggaaatcttagaaatctttagaagatgggtttgggtatttttaaaagttgaaactgaatacatcaaattagtttcttctacagattttatagagatgcaatcttttgattaggtctctacattttaatatacgtttaatattagttaattaattctatagaaaattaaaattttggcaatcgtcactttacgtgctatgaaaagatctattccttcttccttctcttcatagacttactcttttccttcatattctttacctttctttcactcttacttaaatatctaaacttcttctttcttggtttacttactttagcagtttctgtctctgtaggagtatctggcattcccataagtcttgcatatttctttgctttcatcattgaactattaagaacttcatctgcttttgacatatcaacattcatcttagttgttatatctaagaaattgaccttgttattattatcaagagtttcgataacaacttcagaaacacctgatactggtgcatcatcattttcaatttcatatatttgtttctttaatattcctcctgctttcttcttttttgaatcttttttactttcatcattttcaaatcctttccattcgtcttcaaatttaacgccatcctttttctctgattcttcgtcactattttcatcattactttggtcatcattatcactatcttgctcatcgtcacttccttggaaatcttcatcttcttcttcatcctcagaatcgtcttcaaccctatctaaaaatggattcaattccatagcttccttcatttcagctaatttcttctgtacttgtaactttctttcttctctaattcttgcacgttcttcaagtctatcctttttagcttgttcttcaagatattcctgtgctttcttctttctttctaatttacgtttatgaaatcccgtaagatattctttacgttgatctctatcgaaaacaacttcatttactctatgttttaatctttttgattccttatatctcttaccaccggtaagaatctctctattaggcttaggcatgtctagtagtagtttaactttaattaaaaagaaaagtttgttgacaaaatttcagaaacataaaatttcatgctgaaaaaattttattatctaaaattttgatgtgtgaagcccatcatcctttatttactgttgaatttgatatattatacaatctaaacatagatactacaaagacaaaccattatagctgtaatatatagtataacaatacagttggttaaatctaaaaaaatcctccaaattccttcaactaaatatcaattactagcaaatttatttccatcttaaagcctctaaaacccttaatcatcttcgattcccatctcatccatcacttttctaatagttgtctgtttttgatctgcaatcatttgaattagattcatacttatatccttcaattcattatatgttttcaattgcctgatatgttttcttgtttccttttcgtagttcgttatgtcaaaatctttatctagatcatgtcctaaactgacttttaaatttgcatgttcagtctgtatttctttcaatgttgtctttaattttataatattatcagactccttatcttgttttttctgattgacatgatccttgttgaatatagcactcattgtttcgtagataaagaagccttcaagctatataagttaagacacgtaattttgcacaagcgaagcttttcttaattcgatattaattaaactaaaatacaaagtcctttacctaaattagaacaatgcagttatacaacgtgtacatccaatacataataatattagaacagtttttcatactggtgagccttagcctttaaagcatctaattccccttccatcatctcaatagtacccattaattcttgttgagacattttcttttttgctgcataattcagtggttctctaaaactatttcttgtatttacattagaattactaggtaaaatcttattattcgcagttttttcacgttgttcaatccattcccatagtttagattcactcattaacattctttcattagaatataattcataaccagttgactttttaccacttgaaaatttatcacagatgacaattataaataacacaactattaataaaaattttacgtccaattgatccataaacaaatccataaatgtctttggtggctcaggattcagatacctcttcaacttgcagttcctcttcttcttcttcgtcttcaacttcttcctttgacttcttacccttatccttctttttattcttagaaggtgatgcagtgagtttaccaccatgatgcgaatctttttcttcaattctgaaaccatcatacctaatgcttccttttgaccagagataccacctttttcaatagcacctttaatccatgatttacctgtccaaacaaatgatgtaacagcaaagagtttggtggcattatttggagcccaactcaaatagattttagttttaactttaaaagaattaccagaaggaacatctggagattcggtcagttgaacaactaagcaataaccattgaaatccatatgttcaatttcttcatcaaccaaacatctggtttgtttaggaccaacaggaccaccattaatcggtttcacatatttatatgatcttttcttacctgagaattttggtatatcactaatatcaaaattcttttgagttttcaacaaatttttaacaaatgtaacatcgtcaccaaacaataatccatacactatacctaatggtgctttgataatatcatctataatttttatatcagatgattctggggtatatccatttgatgttggtgcatgagttttaggaccttcgaatggtaatccattgaaaagttgttcatttgattcttcattttcttcattatctgcagtaacatcatcatctttaaccatattttcttggtctgagacacttgtatctgatgtgtcgacataagcgttatttgagttgtttgatttatttgtatcttttaccttttgattaattgtgacatcttcatcctctgatgatgcagttgatactgattctaaggaatctacatcatcatcaagatctaaatcgattgtatcaaggccattattattaatattggatttccaaactttgtatattaaatcatatgttggatctcttgacaggaaagatgcaaagacatatttgttatgtaaattgctaaattctattgcattcggtataccaacagttttcttcttttgaattttcaatattgcatttaatgggatagtaaaacgtgttactaaaccaataatatttgaatgaaaacaaatatgactttcacttaaatagagtttaccttgaactaaaatatcttttctatatgcacatgtaaaatcttcgattaatctctcatcagatggtaaattggaaaataatgaacggaaaacttcctgtcttttatcatttggaatcttaacatttaatttctcaaataattgatctttcttcttagcatgtgaagattcatcattattagttgtaaatctggataaactattatctaatgacagtctctttgatgttaaaggtaattttagttttttcttgaaactcatactgttggacataggtatttcatttacatcatttccatcgtaaatatcatcctctgttgataaaattgatgtcaaggagttacgtaatgtctgtttacgtggtaaaggtgataatgaacttttagatctaaactttctagtaatgctttgactctttgtatttgtgttattaattgcacgatcaatctcatctaaagatggtgttgaagaggtagtagcaacaattgttgatacattcgaaggtggttccagagttatgtttctattcattgatattttattatcatcaatatcagataataatctagtttcatttttgggaatgagtccaatgttaaattaccttctcctaatgttgttattcaaagcttttttaacaggcttaaaattgacagcattcaaagcttcatttgatgatttttgacttgaagcagattcctctgaatgaacactttcaacatcttcagcttcatgaacgtgattagtaagatctgtaaaagatttcaaattgatactattcaataatgtagaaaatataccatgtgtgttcattgttgttattttgtttgctttcggaagtaatattctcagtacctttattaattgaagagtctgaatgatttggtgttgagctttgtaatctcaaactcgatttagacaagcgagtatgacttaaagtcttacttaaaagatgtggatttttcaagaatttcttgtgatgatgatggttttcatcattgtcttcattctcatgatcgatatcaactgtatcagtttcatcattatgtcttgttaaattagtagaaaggtcatcgtcttcatcatcggaataatagttggaatattggttattttttctatcattaatatcttcttcttcttccaagtcagtcagtatttgtaagatatccctgatttatctttctttttcaatgaattgtgggtacttaataatttatcaccagttcaatttcttccttacagcatctaactcctgtaatttaggaacgttgttcacgaattggactgaacatcaggtaaaattggtgattttgataagtctatcatactatttctattacttagatgataattgctcgggaaaagattttgattttgacattccatttgaatccctcatactcaattgtgaaccatctaatgattttttaggagtttatatttctcatagattgagatgttaatgaagttgatgataggttaggattactatccttttgacggaatttggccagcattagaagttgaacttcttttgaataatcttgtaagggtatggatttctttttctttttgtacctgtactatcatttgtacttgtattggtaccaattgatgaacttgtcagcatctgtttcttttcttttaatacggaaactcatattatttgtgaattgatttttttttctaatttaatattctgatttaatacttcaatttaatattctaattgagattctaaaaagggttaaagataattggatatgaaaagattagtttattggcttattggcttgtttaggattttaatttactggttcaatggaactttataagactaaacacaagactgattggtaaaaaacataaaaagggtacattaagttaagggatggtgtatattatgcaatttgcgtgtgggaattgctaaaaattaaagcctacacgaaaactaagctgatgacaactaattttgtgagagattatatcctgacttttgataaaacatgtgatgcccatcttaaatagtactgattgtagataagcaattgacatattattcttttttattgttgttgttggagggttttataaaaggaagtttttagtatacaaagagtgaagaagttatataatataaataggggatgaacattacattatttaaaatataagtatcattatcctagatatgatatataaataaattgatagacaagtaatctttaataaaaaaaattaacggtcttctgcccattcattctctcttctgattgcagcttcttcttctggagtgaaatcattaacaatattgaaagtttttctaatttcttcaggagattttccacggatcatttcagcaacaattttacaacctgcattaagtaaaggtttaatgttaagataatttgcagcaaggatgatttcataaagcatttcttgatcaacattaaggaaattcttgtcccatggatcgattggagcagattttttagaatcatcttcttgatcttcctctgggaattctacatctttataatgttcacaccattctaaaatatttttcataacagcggaacgaacattctgtgtaggcacttcaatagtatcattatcttcatcttcagaatctgatgcttcaccatcaactgggagaagattcttaagcatatttttaataagcagggatttttctgcaacttttctttcaactgtgaatttttcgttgtcagaggtaataatcacgatggatctgttagtggacatttgtatctgtgtagttggggttgtttgtttactgaatataacaaaggaaatattgaatataaatgaaaaggccacacagcactactgaaacccaaagtgaaaattggctcatcagtcagtgtccccagcatgaaaatcaaaaatttgagtatttctagatagaatttccctttcttttatagtgttattatcaattctatttgctttataaagatataaactttaaaatactattacagtgtatcagcaccatggatctttatatatctttggactgattgagcttatattcactgagatattccacataataatcccattactcatgtgcatatatagagtacggagaaatgggtgtattacgtaatccttatataaacatttctttttcttcggtgaagaaataaaattttaaattttcaatcgattttgattttcaattgaaatttttttttcactggcttgattacagtacttttaatagcttctttttggactgtaatcgattcacatatacatcacatactccaatggctgtcactaaagaatacgtgttgaccaaggtttacaattatcttactggtcaaggtttaaagaaagctgctgatgctttaactaaagatgctaaaacaaatgaaatagatttagatactgatgatgaaggtgatgttacattagatgttttccttgataatgatgatttaattgcaaaggataaatcaaagaatacttcctctaaagattccagctctgatgaatcttcctcttcatcatcatctgatgatagtgatgtagaaatgcaagatgctaaatctgaattatcagatgaaaataaaactgaaaataagaaagatgattcctcctctgattctgattctgattcttcttcctcctctgattcttcatcttctgactctgattcttcctctgattcttcatcttctgactctgattcttcctccgattccgattctgattccgaatccgataatgaagaagaagaaaagaaagaacaaaaagaagaacaaaaaattcaaaaaactgaagaatccaagtctgattcatcttctgactcctcctctgattctgattctgactccgattcttcatcctcttccgattcagattctgataatgaagaagaagaaaaaaaggaagaaaaggttgaaaaatctgattcatcttcatcttcatcctcttcctctagttcctctgattctgattctgattctgattctgattcttcttcttcttcttcctctgattctgactcttcttcatcctccgattctgactccgattctgattcatcttcatcctcatcttcatcctcatcttcatcctcatcttcatcctcatcttcatcctccgattctgactctgattctgattctgattctgattccgattctgattctgattctgattctgattctgattccgattctgattctgattctgattctgattcctctgactcttctgactccgactctgattctgaaaaagaaaccaataaaaagagaaaacttgaagaaactaaagaagaatcatcttcaaaaaaagccaaatcaaatgaggagtcatcaaccgaaaccacacagcctaaaacaaaaaaaaataagaactacatacctgcaaaagctgatgaaattttaccaggacaaaaacatcatttttctagaattgatagatcaaaaattgcatttgaagctcgtgaattaatggataatcaatataaaggtgctgctggtacttggggtgaaattgcaaatcaaaaattaggtgctgttaaaggtaaagattttacaaaaggtaaaaacaaaatgaaaagaggttcatatagaggtggttctattacaatgagtgttggaagttataaatttgaagattaaattttgataatacccaatacaaacaaattctttcagtaacagttacttttttctcctatcgttaaagtcatattgtagaaatagttataaataaaaacattatatagtaaaaaattaattaattagataaatatattgtgttgagggattacattaaacgtgataaactgtttaatattttaatacagaattaaatctcttttttaaatgtttttggagggtgtgtaacattttgtctaagcctgtcttttttcgtacgataattttatcatttggattctaactaagtatatctctaaaagtttctgactttgtatttgtgcaaaaatagaacatattcagtttgttctaaaaaattaatttctatatggttacaacagagattctaagagatttttattgctattatccttgtatagcgtaacagatggtagattcaatattacgtaaaatcgttatcacaacggataaagttgtcgtaaaattataatattttaagatggtagcaaatttttagttgtttaattgataacttttgtattttaagaggatatgcaagtagtaataagttaagtaatgtcaaataaacatattgataaaattaattgttaaatttcaatataaaatacacaataagaagcatgaaataaaaaaaaggttttttggctgagcctcctaaaaagtaaaaaacatggataattggaaatggcaagggtaaaaagccaaaaatcttttgagttatatcaatttaaaaggcaaatttaatttctaaactacatgacttatggctacaaaatcattttaccatcgtttcattgaatacaaatccaatggaacattttttgaagaaataaaaaaatacggggtaaactgcttagtttttaagctagcattaacaataaaaattgtttttaactcagaaagaaatcaacaaaattttattttttattgctttgaagagtttatacttggtggaaacaaacaaaaattgattactatactaatctttctaaatctttcaaaaaaatcaaaaaaagccacggggtttttcaaatataatgcttgaaaaatcaagccaaaaagttagcatgacagccaagcctaattatttaaaatgtcatgtaggcaattaaatagatagtgtttgaaaataattttatattaaacaaatatgttgaaaattcaactaaaaaatatagtttctaccagatataggcattaaatgaaatctcaaacgtattaacgaaaaaagtcgatatgtatcattaacaaacagtattataacactatattaaatcaaaacgagcttaaaacgtgattccgattcctaatactatttaacgtgatatttgatgaataatatttgaataataatcccacagaataatattcatcaacagggcgccaagttcatattatttgtaattacgatgagtaatcttgttatattatcaaaatgctacatttaatgtggtatcaaacattagttttgttctttcatattttcaaaatcccaaatatactatcggctttttttaagttatcttgcatgttttggattaatgaaatttcaactatgcatcaccatatattgaatgaaacattattgatcacattcaataactattataaaatatcacaccagtctattagttgatacaataaatggtatactaagctataaactctctcggtagtgaattctacagttttgatagataattacagttttttagacagcaaacaatctcgaaaaacatttttccttatacccatctgaaaagattacctttagtcttattccatagatatttttattcgttgtaatcgtttaaactgtcaatatatatattatatatattcttcggcatgaaagaaatcaagaatcttggaaaacggctatttttattaaaaaaatgtaacatttaattctataattctataatatatgcatgttgtgtaaaaattcttggatgagatttaacatactcgatttgtaatgttgcaacaagatccatgcaatagaattttgtatttaatattactgaaaaattaacggttttaatttatatcactcgaatgtttcattttattctttcgttaagttattttcttttaccgatcagattgatcaaagaatgtcaatttaaaaattgttataagttatctttggctatataatttttattcgtattacaagactttgtggttttaatatccttaaagtaattaactttaaaatagtaatcttgattctactattgacatcattttttttctatttcgtcttgagataaataattattcatacaatcattgcaaatgactttgaatttcaaaatcaattataaatattatatcatctccatatcaaaaaaaatgttttttttgtttaattacttaattaatataacactatttgtttttagttaaagtaaaacaaagagctaaaaaatgaaacacatgcttgaattcattactgcttttcttcttttaatagcattcacaatagcagattctactgctaacattcaaacaaataatgttgcttgtaatattgatgcaattagctctaatcttggtttcaaaggtgttttttatcaatactcaacctctcaaacagaccaaatctcaaataccaatttttatgcaggtggctataaaactgggaaacccgttggaactgcttcaagtattactgatattaattttagtgttcctggtggaaatcaaaatatcaacggtgttaatattgattcttccaattttgcaattgaatatacaggttattttaaaggtacgtattgacattataattttatacaaagaatatcatactaacatacttatacttcttttttattatagctgaatacgatggtttatatacattcgatttaactaaagttgatgatggtgctatgttatttattggtggaggtgcatatgattgttgtaagccaggttcaattccagctggaagcgctgatactgctgctcttttctctttcaaaggttggaatcaaccatcttcagaaacttttgcttggatctattttgaaaaaggttcttattatccaattagacttgtctatacaaatgctgtctcagctggtggtatcgaattaattgttactccgccaggctccactgaatcacaaaacatcggtagtatggtttatcaattagttgacaacccatcaaatgtctgctcaaataaggtaattcaaacaacttactcatcagccactacttatattcaatctggaaatgttgctaaaactgttacagttcctcaaactcgtactattaatggtgtctctactgtgattattgaagagcaagtttttttttcaactctttaccaaactaaaaccaactatgtttcaggatcttcaatttatactagctcttattacacaggtgttgttcaaaatggtcaaacacttccagcagaagttgttgttattggtgttccattattatcaactactacagaatatgtcagtattcaaaaaactagaaccgtcacttctgtggtcaatgaaactgttggaaataaggttgttcaaagtagtattattgtcgttcaagagccaaacttacaatactcatatgtcgaagcaagcgttaactctgtcacctcaaccacttcttcatttacaactgttgttaatggtaaaagtatttatacatccgaaattattgttattggtccctctgttacaacacttactgaattctacaatggaagatatacatcaacctacatggtaactaaaacaattacagagaatggatctacttacacatctcgtggttatgttgttgatgttccacgtggtgcttcagttacaacttggaataaaggatctagtactgtttacacaactactctaacttatactactactggtgctgttaaaacctcagaaattattgttcgtgctgtcccatctattagttattcctacacaactggaacagataataagcaaatcaaccaaacttttacaaaaacagtagtttcaggtggagaaacaagtgaatatattgaagtcgtttttgtttatcccacaccatataccacaattttagaaggtccaacaagcactgactacttgacaactagtggtggtaaaacgtatgtcgttgttgaaagatcaagttttcctgttactagtacttttgctgcagtttctaaagtaacaaccacttacacacctattgtaactaatgattcaacccaatgggtttggaaagttatctatccaacccctcaaacacaagttcaagaatggacaggaaaatataccagaactgtcacaagtactttatattatcaagaaacacaagttactggttttcaatatatttattatgttccaacttattctagttctgttggttattggactggaactgctgataagacagtcaccgaaactggttattttacaaattcctttggtgttgtcagtacatcagtttatagagttgtttacaaaccttcaatgtcagaaacaactactagctggagaaggccagaaacttcaactatctttacaactactcaattcactgcaccggatggtttcccaattacgcaatctgaagcaattgtcattgttcctggtactgatgttgtcaattcatggacaacttctagtatttacggaccttgtactacatcatctactgatacatcttactctgtcaccacaattaacaataaagcaacaacaattggtgttgcaatagttagtggtcctgacccatcttgttttgctccaccaccaactacaatttctacaactttaatgtcagttgcaactgattgttctacacactcttccacagcaattttttcaacaagaggtccagattatgcaataactgaatctattatcgttgttattgaaactcctgttccaaattgccaacctccagttaccgcttaccacaacaacacacgttccagcaactgactgtggattaacaacatcaacaacatcaacagtcactacagatactcttaatcacatcacaacaatagttagtgtcattatcagcactccaccagcgtcttgtacaatcaccaccatcgtctcaacatctgttcctgccaccgactgcgctttgaaaacatcaactacatccactgttaacacaaatagtaataaaaaggtaacaactactgtcagcatcattgttagcaccccagaagcatcatgtacagttactaaaactgtttcaaccactgttcctgcaactgactgtggttggacaacatcaactacatctattattgctacaaattcaaataataaagttacaacaacctgtcagcatcattgtcagcactccaccagctttatgtacggttactaaaacggtctccacaaccgttccggcaactgattgtgcaccgaaaacattaaccacatcaatcgttaacacaaatagtgacagaaaagttaccactactgtcagtattattgtcagcactcccaccagcctcatgtacaatcaccactaccgttttaactactgttccagctactgattgtgctttaaaaacatcaacaacttcttatgttgcaactaattctgataaaaaagtcacaactactgttagctttattgttagtactccaccagcttcttgtaccacaaacactacctggttaagatctgtggatgcatcaaattgtcttttaaaaactgtcacatcaacttcaattattactggtatcgataacaaagtcactaattctgttgacataattgtcaatacaccagtcaaggcatgtacaactaccaaagttttgacttccactgtttcagctactgattgtattcatcttacatccacttcaactaacatcattaccgcttctgataacaaagttactacttctttaactctaatcgtcagtatcccagcttcttcatgtacaactaccaaaatcattacagccactgtacctgctacaaattgtgcattatcatctacatcagatacatcaatcgctactggacttgacgaagaagttaccactattatcagcgttacattaagcacaccagtctcatcttgtacaaccaccaaaaatgttacaacaaccgttcctgccacagattgctccttgaaaacatcatcaacatcttaccgttgtcacacaatcaaataataaagttaccactattgtcagcgtcattgtcagtacacccaaaactaccttgtaccactactaaaactgtcactacaactgttccagcatccgattgcgctctaacaacatctatcacctctattgtcgctaccaattcagataaaaaggtcaccactactattagtataattgtcagcacaccagcagcttcatgttctgttactacaactgttactaaaactgttccagctactaactgtgaattaaaaacatattcatccactgtcgctgttaccaattccaacaaacaagttactactgtgataagcattattgtcagtactccagcaccatcatgtacattcatcagaactcttactacaactgttccagccacagactgtattctatcaacagagactacaacatcagtagttactaattctcaacatcaggtagttagtattgttagtattattgtaagcactccaaccgcttcatgcacacaatatcaaacttttaccacatcagtcccagctacagactgtttattaagttcaacaacctccacaattgctgttacaggctctaataataaagtcacaactattgtaagtgttataataagtactattgttccaacctgtacaatatcttcatcatcaccaatacgtgttccaacaactaccatcaccacaacaacttcaaccagctatttaccaggaaatgattgtgaatttagcacagctacatataccagcccattatctacaccagttgatatttcagatgatagtgtaacacagaccatcattgaaactgtctacactcctgctgcttcatgtgatatttttattacaactgagctagcttttaattgtaagtcagcaacatataccaccaatatcggcactgttaatagtgaaggaagatacattaatgcaactttgattgttgttgagagtccagcccaaacatgtttccagtcaacctcaattgagccatcaatctcagttgcaacaccaacaattttatcttctttggattccatttctacaccagcatcaaccaccgctccagcaaaaataacatctaacgaaaaaacaaccaatactgaaattgtcacatgtacagaatcatcatgtactgcaacacaaggaaatccaaaaactacaaaaactgttacagtccaatcaacaacgttaattgttacctgtaccaaacctgaatgtcaaggtcaattgtcaaccaccgttgttcctttaacaaacaataccaaccctacatcaaaaaactctcaaactccaccagaaaattctcaaccaacatatacatcaactgagaatcctaatacaccatcagttgaaacatcaaatactttaccaaatgataataatgatattacaccaacaccaaccaattcagttatcacagatacttctaatacaactagctcaaacactccaaattctccaaacaatttaatcattccaactgggtcaattgggtcaactgcaccaactgggccaactgggtcaactgggtcaactgggtcaactgggtcaactgggtcaactgggtcaactgggtcaactgggtcaactgggtcaactgggtcaactgcaccaactgcaccaactgcaccaactgcaccaactgcaccaactgcaccaactgcaccaactgcaccaactgcaccaactgcaccaactgcaatcactaccaacgataggaatgaaccacaaccaactactcttgctgaagaaccatcaatatctgtaccaaactataactatggtagtactgttgttccatcagagccaacattatctgtttccatttatgccggtgaaggttcaaaatttaggtatgagctctccaatgacatttttctgtctctttatgtcatatctgttcttatgatgaactaaaatttctttttgataccttttaatttttctctccattttccttagctgaatcctatgattttaaaatcaatatttgatttcgaatattgataaagttgaacaatcattaaattctctattgttcacatactagttttttttcatgtttttcataatactatagacaattttgatttcattatgtgtcttctattttatattttagtgttttaatttgttatctcctaaaaattttcttttatagacccaattatataaaaattattataaaagtgtattctcttctacagtttgactttatatacgctttatattacgtaagagtaacatgttctgattacataatcacaatcataaaaaatcttacataattcttaggcaaaagctgattaattcaatttgaaagtaccttctttcaactttctttgatcatcccacttagtagcccatttaatctaataatgtctacagctgctgatagtacctctgctcaagttaagccattagagaatttgttttctgatgatagtttcacagatgataccgactcagacaacgaaccaacaattataccaactaaaaggagatcagctaaattaacagaaaaggcaaaggaatctatcaaaacaattgaagaggaagcaagtaataaagagtttcaagaagacgaattacttaagatcaaacttgatagaccaagtgattttataccagattcagtttcacatatttttgcaaacagtgatttttcttatttaaagctaaaacctgatcattcatctagaccaatatggattagtccaatggatggtaaaatttttttggaaagtttttcacctttatcagaacaagcccaagatttcttagttacaattgcagagcctgttagtagaccaagtttcatacatgaatataaaattactacccattcattatatgcagcagtctcggttggtttggaaactgatgatattatatctgttttgaatcgattatcaaaagttccaatagctacatctgtaacggatttcatcaaaacagcaactcattcatatggtaaagttaaattagttttgaaatataatagatattttgtggaatcatcatctgctgaaattttaagaatgttattaaaggatgaggttattggtaaattaagacttgtgtcatctgaagaaaaatcagcaacagaggatggtcttgtgaaaactgaggcaccaactcaaggtgatctagttattccaggtacaaaaaagaatcatttaaatgataataataaaggtgaaggcgataaagataatgaaaatattgaaaaacttgatgaagaagtcgagaatatttatgctgatgttattgcagatgcagaggatgaaaatactgatgataccgttcattcatttgaaattgcatctgaaaatgttgaaaccattaagaaaagatgtcaagaaattgattatccgatgttggaagaatatgattttagaaatgataaacgaaatccggatttagaaattgatttgaaaccatcaacacaaattcgtccatatcaagaaaaatctttaagtaaaatgtttggtaatggacgtgctagatccggtattattgttttaccatgtggtgctggtaaaacattagttggtattactgcagcatgtactatcagaaaatctgtcattgttttgtgtacatcatctgtctcagttatgcaatggagacaacaatttttacaatggtgtacaattcaacctgaaaatgttgcagttttcacatctgaaaataaacaaatgtttagaggtgattctggtttagttgtgtctacatattctatggttgctaatacaagaaatagatcacatgattcacaaaaagttatggattttttaacatcaagagaatggggttttattattttagatgaagtccatgttgttccagctgctatgtttagaagagttgttacagcattagcaacacatgcaaaattaggattaactgcaactttagtcagagaagatgaaaaaatttccgatcttaatttccttattggtccaaagatgtatgaagcaaattggatggaattatcacaaaagggtcacattgctaaagttcaatgtgctgaagtttggtgtccaatgacaagtgaattttatcaagaatatttaagagaaagtgcacgtaagagaatgttattatatatcatgaatccaactaagtttcaagcatgtcaatttttaattcaatatcatgaaagtagaggtgataaaattattgtcttttcagataatgtttatgcattaagagaatatgcattaaaattaggtaaacctttcatttatggttcaacaccacaacaagagagaatgaatattttacaaaattttcaatataatgataaagttagtacaattttcctttcaaaagttggtgatacatcaattgatttacctgaggcgacatgtttaattcaaatttcatcacattatggttcaagaagacaagaagcacaaagattaggtagaattttacgtgcaaaacgtagaaacgatgaaggttttaatgcatttttttattcattagtttcctaaagatacacaagaaatgtattattcaacaaagagacaagcattccttgttgatcaaggttatgcatttaaaattattacacatttacatggaatggaagatttaccaaatttagcatatgcatcagcaaaggaacgtagagaattattacaagaagttttattaaagaatgaagaagctgcaggtgttgaattaggtgaagatgcagataattttattggacatggtatttcaaagagacttaaatcaagttcaacaaagaatcaagcatcaatggccggattggcaggtggtgaagatatggcatatgttgaatattcaagaggtaaaaaaaataaagaagtcgaaatttcacatcatccattctttgagaaaaactattacagaagaagaaagagataatggaggacgatatattaattacagacaataggttttttttgagatttttttttctttttgttttcttttttgatagaaatataagaatgataatacttctataatatctatagtatacaattaattaatttacataaaataaaactaaattacaacaaatgagttttgaaaaaattattaagtatcagcagattctatttgctgtttaagttctttattgacttcagttaaagtattttcaaattctgagataatatcacttttaaaatctacaactgattccaatgaagttgcaatatcgaaaattaaattactcctcttttcactaattaatgacattatacgtttatattcttcctgtgtatctttccatttttgatcaactgattttttattatcaatattttgtgatttaaatagacgtatttctttaaccatttcctcaaattctatttgctttcgcagatgaatctgcagtatatgaatcatttaaatcattatattctttacgagatttagttaatttatcttcaagttcttcaactttatccttatctgacacaattgaaagttttaaatcatctaataattcttgtgattgtaaaatttcatcttgaaatttatttatatcagataaaatatttaattttaattcattaatagatttttgaacatttgataaatttggtaaaatatcaattggttttgtattgaattttgatgatttaaattcatcattaattgaattaattattaaatttgaagttgatattggattcgaaagattaagattatttaaaatttcataaattaaattatttgaagttgttacaagtatttgtaattcattgaaagaattttgtaaatcaattaattttaaatcaattgaatttttcaaatgagattgttttgaatctaattcatttaaactattagttaatattgctctctctttatgtaattgttcaatatcatttaaagttaaatttttcaattgtaaatcatttattatatcttgcttttctttatttatatttttaattgattctttgatatttataatatcagaatttgcttttttaattatactcggccatttcaattgtctttgcttttgaatttctatataatttttaaatttaataacatcattttttaaagcatttgttctatctaattcatcaaaaaatatattatatttatcattagctatatttaaagattcttgtaaattttcatttaattgagaattataatcaaatttatgttgaatttgatcaatataatttttatattcataattcatttcatcataaaatttagaataatcatcatcacctagtaggaggaatgatttataagattttaaagcatattcaataaaaagtctgtttagtactgattgttctgcttctattaccgaatcatcatatttgttattattattattattattattactattactaccaatattatttatatcagctaggttattaaaatctattgagtcgaatttaattgtatttttaactaaatctaataaccaatataacattgctaagaagattggccaatttgaaccaccaactgcacttatttgagatttattaatagtatcaataaatggataatttaaaaatttcaataaagtataaatatcattatcaattgatctactaaatttataacctggatcaattttatgatataaccattggaaaattaacaggaattccttttgagttggagttttcaaagttttcaaagataattgttgtttcatttcaatatcaaatttattagttgctaaaaatttatataattcatcttgtaccattgattgaaatctatgactacgaattggtcttggatcttgatttttcaattgttgttgatgttgttgatttctgaaaattccaccggctgatgttggtaatggttgaattgatgattctctttgattattattattattatttttaccattcatgccatttatgccattcttattagttctttgaatagaaccttgtactaattgttgaattgttggagttgttgaactattattattgatattattgatattattattacttaataatgattgacgatgttctaaacggtgtacaggggtcattgaggggcgattaattaatggacgaggaccaagtggagcaccaagattagccccgggaggagcatttgaaggtaaaagactgagtcgctgacgtttacgcataggacccattgagggagtggaagttgccattgcaataccaatcactttcaaaagaaagaagagagtataacatatagaaatagaaactaagaaacatgtaaaaggacgttatgtaaacaaaatgagaaaatttaatttttcactatcttaatgatgatgatctatcttatatcttaagacaacgggtaatgagtgggtctctacgagggattggcactgggagtagacatttggttggtcagttgagagatcagtatcgtaatgttgtactaggggagaaatctttacgtagtaatagtagtaataataataatgataataatgataataataatacccttgataaaatcactatagactaccctccagtactggataagataatcacacgatttaatgtaatggaaatggaatttgctttcggttatggttcaaaagtattctctcagggtaataatgataaatctgaacaatcacaaattgatatgatttatgcagtacgaaattcaattgattggcataatgaaaatttaattaaaaatagtaatgattattccattttgaaatatggtggtggtaaaattataaatactgttaataattggggggctggtgtttattttaatccatttgttcaagtaccagttgataataataataataataataatattgaattgaaatatggtattacatctaccaaaaatttaattgatgatttaatcaattggaaatcaatgtatttagctggtagattacataaacctgttgcaagttattaaacaatcaaataaatttaaaattttcaatgaatataatttaactaatgcagttaaattatcattattattaataaataaagaaaatataacatttaatgaattatttctgaaaataactgaattatcatatattggagatccaagattaaaagtacgtggagagaatcctaataaagttaaaaatattgttaataatcaatatgaaattttcaaaatattatatatcccaatattagaaaataatttaaatgatttaattcaaattaataaagatgatgaaataattaaatttaatttaacaattgaatcaattggtaaaatattggttgatttaccacgtaattttaaatcaaaattattatctaataatattaataagtatgaatatgatgaatttactaatgatgttataataaatccatttttacaaattggtaatgaaatgagttataatgatttattaaatattaaatctataaatgaaatttcatcaaatgaatgggaatatttagcaaatgatattaaattatcaaattcttcatcaattagaagattatctgaaaattttttcaataatggaaaaattatgcaaaattcattaattaatgtaattgaaacaatagttggatcaactgcacttgtacaaagtttaaaaggtattttaactgcaggtattgtacgtagttataaatatgcaatagctaaaagaaataaagctaaataaattaatattttatggatactatatactattatacatcaattttaattgtaatactttcaccaattgtataactaactgcaagtaatttattaaatttacaatattttaaatctgaaataattgaaccttttggtaattgattttgaaataatgcaatttgtttaatattattaattgaaattttccaaactgaaattgaacctgatgaatcaccaataaataataaattatcatcattattaaaatttgcaattaaaataccatttggatcatcaatatattttatatcaattaattcattttcgaaaatattccataatctaattgaaccatctaatgaagttgataaaattaaatgattttcattataatcaaaccatgtaagataagttattggtaatgaatgaccttttaataattgtaaacaattagttgaattacctctaaaaattctaatatttgtatcatctgatgaagttgctaataatttacaatttgaattatatttaataaatgaaattgaatcttcatgacctaataatttcccaataattggattttcattatttaataattgattaacaattaatgaataatttggtccaggtattaataaatttataattatctaaccaacaaacatctgtaccgaaaagtgatatatgattaatgttattatcattattattttcttttattatatctttaaatgaatctttatctaaacgtactattggtaatttagaagatacatcccaaacaattattatattcattaaatcaagtgaaagtatatattttgaatttggtgaccatttaacttgaattattggataatgatgaattgctaaaattgcatataaactattatcattaatattattccataattgtatagtaccattttcacatgcagttaagatataatgttcatttggagaataatttattattaaaggttgtttatatgaaggtgatattggtaattgaatatttgaatttgaattaaatgaatgaattaatgaattatttgaagttgttgcaattattaagagagtttgaagattcacttcttatggagaaaaggcaagtgaattagaaggtgggaatgatcatttcctttttaagtattttaataaaatgattgtgaagatggtgatgttggaaggtattgaaggagatgtagatgtagatatagttgtagttgtatcatttttaacatcattagtagatggatttttcaaattagaattagaatcatcaatagcattaaataaattaaaattagaacttataagttgatcctgtaatagagtatcattatcaataattgatgataattcattcattttagaatataatatacctttttgaactaaatctaccaagcaacctattggaactaattttgaatatttattatccaaggtatgaacattagtttcatcatccaaggcgtaagatgagatctccaatcctttctcttgaagatgtctccagattatatagttaagttcatcagatgatagtgacattgtttgtccaataaagaagttgttgtgtattgaagtagtattataattaagaaaatttcagagtctattacataataataataataatatagtccaataaaccgtttttgactccgtttaccgttcttttggtaatgacaatgaagttaggtacgttatctatggttacattctccaagacacgaatacctgaaagggtatataaagaaaatgaacaagatcaagacattatgtatattaaatataataaaggatggggtgaatatttatttagtggtatagttgaattaattgaagataatgaaggttatttgaatttagatattaaattatatacgggggaggaagtttgtaaagttaaatattgtaaagtaaatgataatagggggaaatggtttaaggatgaaattaataatgaatatgttatgacaatacgtaaagttgatataatggatgaaagatattgtatattagttaaatattttaataaaagttatttagagattggtatgggattatgtcctggtgatgaaactaaatttgatattttattaaataattataaatgatagtgttagtgttagtgtttattattatatacaggtttatataatgattataatatgatggtataaagatataatgatatgaagatataatgatatgaagatataatgatatgaagatataatcatataaagatatcatcatacaaggatattatcatataagtatatcatcgtataagtatataatcatatagtcatatcatcgtagaagtatatcatcgtataatcatataatcatactttagtatgattatattcttatactcttatatactttaattaatatctctcccattcaatattacgcaattgtcttgcaattttagcattctttctcttaattgaccaatttgaagcagttttagataatctctttttagctaattcaatagttttattatttgcctttgttgtaatattaataaaatgatcagaaacattaaaagttgccttaatttcccttcttggtataccattatctctcatattttgaattttttcaattattttattatcatgtaaataattttttggatttgatgattgataaatttttggcatattattggaattattttctaaaaatgataaattttgtaaataaagagatgaatttttacgtttatcatttgaaggtaggaaaatttttggagttaaaagtggagttgttgtagctggagctggatgaaagaataaaccttgaggtaaatcaggacgtaaattaaatgcagatgatttattattgaaagaattaggggtagtacctaatttctttatagtattagcagcagccttgactgatttagtagtacctgacattgtataaaggaagtgtatcaaaagagactctatactatactatactatactatactatactaataaattggaaattcatgttgtgagaaaatgaagatttttccatttactatggagtctttctttcttcatctcttcatctctctcttttggcaatgttcaaggcatcacagagggcttatatatcccgttctatattcagtaccacttttctggtggccactgctatggtaactgctaataccctatttccatgtccaatagatcacacattggcaaatgattctccacttaatgacgttaataatgatgataaaaaagttataaaagagtaagtacattactattcaattacattacattcaattctattctattacattctattctgctaagatactatactatactacactaattactattctacactgtatataatataatataatataccatactattactatataaaactattataaaaaaaatttacacctttcgctattggttgaattaattattattatattcttcttcttctatttgccactcttttcttttcttttgctgctttcacttccttctcttaccacacaactatgtcatccgtagactctgaaaatgattcagactattctcctgaactcttattctcatcatctactaaaaaattagatttagactcaaatctagatcctataaatactaccactactactaataataacagtaacaatcctattactaacaatactacaaataatttacctgcttcattacctcctattccactaggtaaaaaggtaaaatttgctgaaaatcacactgaaataccttctactgataataatgatgataatgataataacattaataatgaaaattcttcttcatcttcaaattcttcttcaacacattcatctcctaaatcatctcctaaatcacctcttcaatcaccttcacaattaccttccccctccctttcatctcattcaattattgaaactccacaatcaattgaattatttaataaattagttcaatttattattaataataattatatctctgatccttcatttattaataaatctccaattgagaaaactttatttacaattaattcttataatttagcaaataattcaaatatttcaattaatgatgtaaatttaaattttaatgcaacaacttcttataataaacaaattttaaaatcaaatgatgaaattcaacctttaattccaattaatccattttgtagaagaattgatattaatattcaattaaatgatttagatttaataaatttccaaaaatttaaaaaaaataatgaaatttattcaaaagaatttgaatgtattaatttcccttcaggatcacgtttatttattggtaatttagctgttaattcattaaaaattattgatgtttggaaagttttcatgccttatggtgaaattatggcaattaatttaaaacaaggttatggatttgttcaatttaataattcaaaatcttgtttagatgcaattaaaggtgaaaatcatgttcctttacataataaatttatgcaattacaaatttctaaaactcatgaaaaacatactgaaaataaagatttaaaggataaaattattaaagatttaaatagtaatcataatagagatagagatagagatagatcaccaacaagaggtaatagtatcaatactaacaataaagttaaagttattatatcaattgattcagatccatcatttaatcatttattagttaatacattaaatgaaattggattagattgtaatgttaaacatattgaagaatctgctgataatataccacaagaaattatttcaaaatctgcttattcaggtgtaattgcaacaattgtaagttcaaattcagaattagttaatttgtatttatttcaaagaaataatattgataatgcaattaaatttgatcaatatgatgaaatttcacttgaaagtgcagttaattttattaaagagagaagaaatttatcaaataattctaataataatacaagagaacaaagggatagaagaaatcatagagatagagatagagatagagatcgtgataatcatagagaaagagatacaagaagaaatagaagaagaaataataataatagtaataataataataataataataataacaattctaattctaattctaacagagttcaatatggttattcacataatcaacaagatgttcaaaaacatttaccaccgattgttccaacatcatattcaccatatcaatcagtaccacaatcattaccacaaccagttgttcaaccaccatatcaacaacaacagtatccaccaccaccacaagtacaagttcaacaatcaataccaccatatcaacaacagtatccaccacaagtacaacaaccaccttaccaaccttattcaaatcaaccttatcaaccttatggaaattcaccttatcaaccaccacaaccacaaccaccagcaaatcaaccagttgcatcccaattagtaaatcaattatctcaacttgatgaaaattctcttaaggcaatgatttcattagttaataataataataataataacaataataataattcatctgcccctcctcaagcacaaccgccagttcaagcaccttcttcatcgtcagcggatgatgatacgagtaaattatacgagacactggcgagattaaagaataacatgtaataataataataataataaataggtttacactatactatactatactttactttactatactttacgtaataaaacactaatacaaatgtaataacagataataacaaactctacggagtataaccatacgtaaaataaaatgatcaaataatgcaacactggaaaatcatttgattatgaaatttcaattttccaacgcaacgccgttttaatataaagtcaccgtgttttcaccactgatttccgtgtttccttttcatttgctttatgttgcttttctttaattcttatcttttctttcttctatcttatttcttaataacaaataatgtctttagaggaagcatttgaagaaactaagaaagaattaactattacaactgatcaacttaatgaaattactaatcattttgttgatgaattaaataaaggtgcatcagttaatggtggtaatataccaatgattccaagttgggttttaaattatccaactggtaatgaaactggtgaatatttagcaattgatttaggtggtacaaatttaagagttgttcttgtcactcttttaggtgatggtaaatttaaattttcatcagaaaaatatccaatacctgaaccaatgagaacaggtaattcacctgatgaattatttgattttattgctttaaatttacataatttcgttatttcacaatttggtgaaattaataaaattgaaaaacctttaccattaggttttacattctcttatcctgctttacaaactgctattaatacaggtgttttgaaaacttggacaaaaggttttgatattgatggtgttgaaggtaatgatgttgttccaattttacaaaattcaattaataaattgaaaactccaattaatgttgttgcattaattaatgatacaactggtactttagttgcatcaaagtatagtgataataaaactattatgggattaattttcggtacaggtgttaatggtgcttattatgatatggcaaatgaaattccaaaattacatggtaaattaccagatgatatagttgaaaataatgaaccaatggcaattaattgtgaatatggtgcatttgataatgaatggaaagttttaccaagaactaaatatgatattcaaattgataatgaatctccaagacctggtgaacaattttatgaaaaaatgattgcaggttattaccttggtgaagttttaagattaattttattagattattattctaaaaatttaatctttaaagatcaagatattaaacctttacaagttccatttgcaatggatacttcatatccttcaagaattgaagaagcaaaggataaatcatttattgatgaattatttttagaatcttttaatattaaaattacatcaattgaaagaaatttaattcatgatttatgtattttaattggtacaagagctgcaagattatcagtttgtggtattggagcaatttgtaaaaagagaaattatacttcaggtcattgtgcaagtgatggatcagttttcaatagatatccaaattttaaatcaagagctcataatgcattaaatgatattttccaatggaattgtgatccaaaggattatccaattcaattaattcatgcagaggatggttcaggtgttggtgctgcaattattgcttgtttaacagaaaaaagactggaacaaggtaaaagtgttggtattaaatcaaaaatttaaattacttacataaaataattgatgatgtccttttcatgtcctttcatgtcctttcatgtcccttactttacttcacttctttctactatccctttttgtatagcttatattagaaattaaattaaaatattgaaatgttataagttagtattatgtactatcattaaacatcgcgttttgtacatgtcaatatttatcatcaatctttaacttatagaaaacatctgtttccccttttcttacctgttgtttttgcccttgagcatgcatcaataatggatacactacgtaaactaaccatctatgcattaaataatgatatgtatgatacagctgaattcacagcagagagaatcttagctcaatatgataatgattcaaatatttcaaataaaaagcaaaataataataacaataataataatactagtgataaatcaagaaatagtaataacagttcaattcataatgcaattattacaggtactccaacacctaataaaaattcaattaaaaatattttaaataatgaagatattgaaatagaaattgaaattgatcaatcttcaacaaatttatcatcttcaaatgaattaaataaacttgatgcaattcatctttatagttatgttttatacaagagggggaaatttaaaactgcatttaatataacttgtgataatgctcaattacatataggatgtgcatatatttttgctcaatgttcattaaaattaggtaaagaaattgatggtattagaatattattaagaacaatgaatatttgggaatcaaataattataattataattatactaatttaagtgatattatacccgattcaattgcattttatcttttacttgggaaattatattcatcaattggtgatattccaagagcaaccattcattattcaaatgtacttaaattaaatccttatatttttgaagctttagaacaattatgtaaattaggtgttaaagttaatgttgatgcaatttataaaaataatggtgaatttttaattaatgctgaaaatgatattaatgacgatataattataaatgataataataataataataataataataatgatgataatgataatgatgttgataacgatgaattagatataaccaataatccattatttaaaactccaattactaaaccaacaataacaactagttcacctgaatcaaattttatgactccaataaataaatcatcattgttgagtaagaaaactttttcaaagaaaacttttaaaacatctaaaaacttgcataataataacaatatcaataccaatgccagtacaaataatagtaatagtataaatataaattcatttctttcaaatggtaccaaaagaaatacttcaattacttcaagattaataaataatggtagtaatcttttaaataaagatataaaagatgttttcaaaaaggatagtggagattcaattgataattcaattatcaataatactactgatgaaatatttaaaattcataatatggaaaagggcaatttattcaatcataacaacaataataacaataacaatactgctgctaatgtaaatacaaataataaaccatcatcaactaatagagcagtcaaaaatgaatatataaggaatatttattgtaaaattggtaaaggtatatcagcatttaactcttttgattgtttccaagcaattagaatatttgattcattacctgaaaacgaaagaaacacgccgtatattttatcaaaattaggtaagttacattttgaaattgttaattatgaagagagtgaaaattattttgaaaaactacgtaaaattgatagaactagattagaggatatggaaatttattcaacattattatggcatttacataaagaaattgaattaagtttcctttcacatgaattatttgaaattgatgataaacatccaaatacttggataagtattggtaatttatttagttttaaaaaagaaccagaggatgcaattaaatgttttaataaagcaattgaatttgatgataaatgtttatatgcatatacattaaagggacacgagtatttggcaactgattcatttgagaattcaataaatagttttagaaatgcaattgttttagataaacatcattataatgcattttatggtattggaatggtttatttaaaattaggagatttccataaggcagaatatcattttaggaaagcagttgaaattaatcctgttaatgtaattttaatttgttgtgttggtatggtattagagaaattaggtaaaagagaggaaagtttaaaacaatatgaatttgcagttaaacttcaaccattatcaatgttagcattatttaagaaagcacaaatattatataatttgaaaaggtatgaagaagcattgaaagattttgagaaattagagaatttagctcctgatgaagcaagtgttcatttcttattgggtaaattatacaaattttatggtaggaaacatgaagctgttaaacaatttactattgcattaaatttagatccaaagggtagtcatttaattaaggaagcaatggaaagtttgaatgatggtataatagattaataataatcatgttcatattcatattaattatttttataacagatatttatacctataaacaagtggaaaagagaggaggagagagagagagagagagagagatatgcacatataaacataattaataaccttttctaacagcatctttaacgacactaaataatttagcaataccattttcgaaaactcttttacgattagcaactttcttagccaaacgtttcttatttggttttataaagaatctttgactaaaattaatttctctaagtttattagttttaactaagatatcgagacgtgaaattgctctatcaatttcacctcttgcaacaataactgaacgacccgctaatttatcttgaatgatatgttttgttgcaaattcataaggattatgaataattgatgattcacttgcactaaagctaagtccagatgatttattctcttttatacttttaatcatttgatcaactgaattaatatccttttcagcatttaattttgaatttgtactgttatttctcaaaacagatggtctccataatgatttagagacatttctagtagtaaatgcggcagtcttaaagaggaacatcgttgtctatctactgtaaaacagtgaagtgaaatgaaatataagtgaaagaaagatagattaatggaaaatgttgatgaaaaaaatggaatttttgaaagagtcgcttatatataaggacatttccaattttcaatgctttttatacatggatggttatatactggtagctctttgatttacttattacttgatttatcaactatgtctgaaggtaacagtgctgtggaggaaattgtagaaaaggtggaatctttatctactgagaatgaacctgttaatgatgtaattgatgcaaatgatgcaactgcatcaagttctagtgataaaaagaaaaagaagaagaagaagaataagaataagaaacctgcacaagttttcgaaaattcaattggtaatatctatagaggtgtttatccagagggtgaatttcaagattataatcttaaacgtacaacaggatgaagaaattagagctgattttaatttagaggaagctgaaaaaacttggaataaatttagaaaaggtgcagaaattcatagaagagctagaaaatatgcaagggagaatatgaaacctggtatgacaatgattgaaattgttgaaatgattgaaaatcaagttagagaaatgtcaggtacaaatgattcattaaagggtggtatgggattcccaactggtgtttcattaaatcattgtgcagctcattatacaccaaatactggtgataaaactgttttaaattatgatgatgttatgaaagttgattttggtgttcatgttgatggttatataattgattgtgcatttactcatacatttaatgataaatatgatccattattaaaagctgttaaagaagcaactaatacaggtattaaaactgctggtattgatgttagattgactgatattggtgaagcagttgaagaagttatggaatctcatgaaattgaattagatggtaaaatttatccaattaaatgtattagaaatttgaaatggtcatacaattttaaatcgtaaaattcatggtggtaaaagtattccaattgttaaaaatggatgatccaactaaattagaagagaatgaaacaattgcaattgaaacttttggttcaactggtaaaggttatgttaatcatggtggtgaatgttctcattatatgaaaagttgggaacctccaactaatgcaaatattagattagatagagcaagaaaattaatggatacaattgataaaaattttggtactttaccattttgtagacgttatttagatagaattggtgaagaaaaatatttacttgcattaaattctttagttaaggaaggtttattaactgaacatcctccattagttgatattaaaggttgttatactgctcaatatgaacatacagttttattacaaccaacaagaaaggaagttgtttcaagaggtgatgattattaattaattaattattaattaattgtattatagttaatattgggaaatatatattccatcagaatttttatagaaataatcgactaacaaagaaacaaataaacaaaatatattattaattaaaaatcatttataaaaataatcatataatacattatatatactgaattatagttcgtctttatctaataatacctctgttatgatatcagtagctgtttcaagtgttgtagatacagtttgagaaatcaaacttgatactacattagttgaattaatctctacatcaccacttgaactagatctaaataacattttcaatggagataaaattaaccataatactaataacacgggtctcttaaagattcgtcgccataaaatccaacaacaaactgatataaagaaatataatgaacgataaattattgctctttcgcttttacttgctttattaattgatttaacaagtccattagttttatttaatacatcaccaaaaaatgcataactttcacctaaattagaaattgaatttgtagaaatatctaattctgaaatattaatttcaccagctaataaagttgattttattaatgcattaacattttgaagtttatcagttaatttagtattttgtcttaataatctctcttgattactcaattcctctaatttttcatcattcaaaccttcattgtttaattgatcattgttatcatatttatttaacatttcattatcatcatcatgaccatcatcatctgtattactattcttaattgataattcacctctagtgaaagattttaaatacaatgtttcattatatttcctcttttcatcaacttttttcattctataccttacatatagatctttcaataattccttactgtgaaacaaattatattctaatgaatttctgttatcatttgttgaaataggtattatctcatattgtaattgagatatatcaatttcaattttactcaataactccaatattttcgtattagaatcatctattccctctgcactttccacatcttccacactatatttctcaatgcaaatacctgcactatgtatatctcgttgtatagtgtctattagatccactgacatctataatcttaccccaactatcccatcaaagagatcaaaagagaggtgtaaaacctctaaggaagatggtagtaggaagagcgacattgaaaagtgaaattttgtaaagacttatattatcatggtttctttagcaaattgtcggtggcgaatactttgtttggtcttcctttagagtagtttgtaggtattgaacaatgactgaagttatcactgctgctatacctgattttaaagtatctgaaactgtctttcttgcacaacatgaagataataataaacaattgattgaatctattgtttcatcaatagtaaaggaaaatatgtcatcatattatcattatttgtattatgatattcatttaaagggacttgaatgggatcaaagtatttatgattcacttttaagtgaaagtgaaaaaaacattaagaaaattaaggaagaaattgaaaaacttgaaaaagaggatgaatcagagatggatttattaaagaaatggacagaattaggtgaatattatgccaaaattggtgataaaataaatgcagaggaaacattattgaaaactattgaattagcaccaagtacggggtctaaaattgatttatatttattaatttcaagaattggatttttctataatgatttagaatttactaaaaaatatttagataaatcaaatgaatttattgaaaagggaggtgattgggagagaaagaatagatataagacatataatggaatttatttaatgtcaattagaaattttgaagaagcatgtaaattattaaatgaatcattaacaacatttacatcaactgaattaacaacatatgaaaaaattgcacaatattcattaatttgtggatcaattatatttgagagaccagatttaaaaaataaattaattgaaagtcctgaaattttatcaattaattcaacaaatgaagaattaaaaccaatttttgaattagttaaaagtatttatttaactgaatataataaatttttccctgcattattggaaactaatgatttaattttgaaaaaggataaatatttatttgaacattgtaattattatatgagagaaattcgttgtcgtgcatattctcaattacttgaaagttatcgttcattatcattaaattcaatgtcaaaatcatttggtgtaagtgttgaatttttagataatgatttaagtaaatttattgttaataagaaattaaattgtgttattgataaagttgaaggtattgttgaaactaataaaaatgataataagaatttacaatataatacattaattaaagcaggtgatgcattattaacaaaattacaaaaatatggtgcagctgttcgtatgagtggagctgaaaaggtatagattagtatatataatatattatattattataaataaatattatataaatattatagaaacttatacttaaacttaaagtaatggagcagaattaagtatctcttcaattctctcatcttcaacaagtgaactatcagaatatttaccatcatattccatttcattagattctgcaggtatcacttgacctttatgtttatcatctaatttaacattaagtatttccttctttgcatcatctgtcttaacaataactttatcaccttgagtcagatcatccatcatctctaatttatcagattcattatcggttgtagtatatagagatttcatatgttttagtaattttttctgttgtataactggtgtcataccaacagttgcagcaattccaagtactacacatataaaaacaatgaacttctttgcactactagataccatgattgtctgttgttgaagaaagagtgatcagttcatgtagtaaattaactcaccgcattgattcttatctcattaattttttctataatgttgataagttattattgtattgtacacgatttacagataaatatatatagatatagatagttatataggtaggatgggttgccagatgtgtatggagttatcattactacatgaggcaagtgttggaacatccatatcaggagcccaagtaacatcattaacaggtagtaaatgacctccatgaacaaatataggtgtaagatcttcagtattccataatacaactgttgaatcaactgatgatgaaacaagaaggttactcttattagatgaatatttagtagcagttatggaatctttatgttgagttgaatttataattggaattgaatcatttcttacatcaaatatattaattaaaccatttgaactacctgaaactaattgtaatgtattaaatggattaatatcaactgtatttaaaggttccttattaataaattctttaacacgttgagatgatgaaggatttcgtatatcccaaatagtacatttaccatcttcaccaacagatgcaattaatgaattatgatcaggtatccatttaatttcattaacaccataattatgtgcaggtatatttaaaattggttcagttaatgtacaagtttgatttgttgttaaagttgaaaatttcttctttggaggtggataaaattgagattgtaaatcccaaattgcaattataccatcatttgcagctgttgcaattgtaaatttattaggattccaatctaatgtccaagattctgatgtatgatatttaagtaatatatcacaagtttcaatagtagttgtgtcattattattatcactattattgtcattattattatcactattattattattatcattatcattagttaaatcttttatattaaaattatttggtttacgagttctatcaaatatacgaactaaacctgaatctgaagaagttgcaagtaaatctgaatgtaatggacaatgtttaattctattaatatcaccattatgaggtatacgttgttgtaaaccaattgaattagtaacagttttaatttcaggttcatcaattaatacatcagtatcaattttatgtaattcctttgtattctttaaatgaggtaatggaagtgaataattaaattcttctttatcaattgaataatcaaaattttgtaagtttgatgaattatttgaatttaaatcaattatattagcattaactaaaagtaaagattcaattgaattaacattgttggagaatgttgaaatagctaatttctcaacatgtgatatgttatttgcagtagttgtagtgttattattgttaataacatccttatttgaggagtagtcattccttgacgcggttttaccagtgtttggtaaccaatctatagctaaggatggccatagaagggaagatgtctgtatctgataatagttatagggggtattcttcttccaagtgggatagtccataattctaattataattatcgtaagatctatatatattcctatatacaaaacctgtcctggtataaagcaaagacccatgtaaagatcatatagagaagaccaataaagaacgtgttttgccctctccctaaaaattttgaaatttggacacagcgtttgtttatatagttggctcatcccactatttgttgtctttttaactgcttttacttcttttcatttcagttgtacaaccatgtctaaacacgctaaatcacaatctacatttgcttttgaaaatgctagttctaatgttgcagcttctcaaatgagaaatgcattgaattctttagttgattcatcaaattcatctcaagatatttcagatgaaactaaattaagattcgaaaatgaaatggattcattctttgccctatttagaagatatcttaatgataaagcttcatcttctaaaacaatcgattgggatttaatttcttcaccttctcaaaatgaagttgtcccttattcaactttaaatgatgattcatcaaataaaaatttcgataaattagcagtacttaaattaaatggtggtttaggtacttcaatgggttgtgttggtccaaaatctgttattgaagttagagaaggtcaatcattccttgatttatctgttagacaaattgaattcttaaataaaacttttgatactgatgtccctcttttattaatgaattcatttaatactgataaagatactgaattaattgttaaaaaatatcaatctcatagaattagaattaaaacttttaatcaatcaagatatccaagaatttttaaagataatttattaccagttccaaaaagtattgatgataaattagatgcttggtacccacctggtcatggtgatttatttgaaagtttagtatcatctggtgtattagattctttattacaagaaggtaaagaaattttatttgtttcaaatggtgataatttaggtgcaactgttgattctaaaatcttaaatcatatgattgaaactggttctgaatatataatggaattaactgataaaactagagctgatgttaaaggtggtacattaattaattataatggtgaaattagattattagaaattgctcaagttccaaaagatcatgttgaagaatttaaatcaattaaaaaatttactaattttaatacaaataatttatggattaatttaagagcaattaaaagattagttgaatcaaattctttacaattagaaattattccaaatcaaaaatcaattactgttggtaattcagatatgtcagttatacaattagaaactgctgtaggtgcagcaattagatattttgataatgctcatggtgtcgttgttccaagatcaagatttttaccagttaaaacttgttctgatttattattagttaaatcagatttatttaatttacaacatggtacattagttatgaataatttaagatttggtggtgctccattaattaaattaggttcagattttaagaaagtttcaaatttccaacaaagaattcctcatatgccaaaaattattgaattagatcatttaactgttactggtaatgttttctttggtaaaggtattcaattaaagggtacagttattatagtttgttctgatggtcaaaaaatagatattccaaatggttcaattcttgaaaatgttgtcattactggtaaccttcaaattttagaacattgattaattattcaattattcaattattctccttttgcattgattcaatataaatttttgtttaaatgtttagatagtgtttaaaacaaattttatatttcatattttatatttaatattttatattttaaatatattttaaaacttaaattatattattaattttattataaaaacttaatataaaatgtaaaactaccttccaaattccaatgcacgcatttcctttccaagctttctcttacgtttacgttcgatagatttattcttttgtttactatccatactctcaaatctatcaacaagtaaaactttcctcttctctgctctagttaagaatttcataccaccattttcttccttttgtttctttaaataagttcttaatgcttccttttctctatcctttttctttaatgaatctaatttagatcttgtactttgtaatttatattttaaatcttcaatttcattatctgtcatacgacttaataatttcttatttttaagaattttctccatttctaaaatttctttctccctatattcatctaaaaatgcatattgtttcctaacaacttcataatcaacagatttacctaatgctgtatcaaatctaacatctctattaccaaataatcctccaattgatccatctcctgtataatctttcttaatttcaagtcctggaatatctcgtacaacacttacaggtcgtttactaatttttgtctcctttggtgcatgtttattgttcttcttcttaatcggttgattagttggtcttttaactgatttttcatcttcactgaaaaaatcatcttcctcagattctgatcctgattcagcttcggaatcaatttgattatcaataaatcctccattggtttcctcaggtcctgaatctgaatctgaatctgaattggaatttgatctaagtctaggtttacttctatcttcatttctgttcgaaaatccgcctctacctctaaatccacctctacctctaccttcaaaactacctcctctacctctaaatccacctcttcctcttccaccaaagttacctcctctttctccttttcctcctctactaccacctctacctccaaaatctttacctctcatgtttccacgactattgcctctgaatccaaccattgtcctgtgtagaaagaggtaacttaaacaattaaaaattaaaagataaaatttcatgaaaaatatttttttttcaaacctattttcatggtcggctcaacaaacttagtatacattttttcaattttaatatcagttttgtaaaagctatacaaattctttaaaaaaacaatgcctattctaattatatatattatattaaattatttctctttatcccttgataaaaaaaatcctttgcccaaatcatcacactaattatattacgaatcacatattaagtgaataatacttatataaaccacgtacacttaaatcattaccgaaatctttatcctgtacagcataaccaacatcatcacaacaattaattttaacacatgcataacctaataaatttaaccttttaattctatttaaaactaattgacctgtattaatatcccattcaactaatcttgcacctgcagtttcagtttcataattatcataaaatttattatcattattatttaaaattctatgaacccaacttcttcttgagatacctttattattgaaaactctccaatattcttcgttttgatcattttgatctattatatagttattattgaaatttaaattatcataaatttttaatttgaaaacatgtgctaaattatcagttaatgaaggtttaacttcaaaaatttctatatttcttaattcaattataatatttttcaattttgcaacagttcttgtacttgatgaaatatctaaaaattttaatttatttaagcaatttaaactacttaaaatttgtaaatcttcaaaatttgaaaaatctaaattaacatcacaaatacttaaactctctaattctgtaaaattttcacttatctttttaatatgatcaccattaatatttgcaaatccatttaaatttaaatatcttaaatttggtgcaccatcagctaaaatttgtaaaattgtatcaattctttcagtacttaaagtttcacttgagaaacattgttgtaaatttaaccatcgtaaacttgacacttcatttgaagttttaataggtttattattgttattaatattttcttcctcttcatcttcattttcgattttaacaccacatacagctggatgttgtaaaaattttaaaaattcttgaaatgtacctaaatgagaacatttacgtaaagataaatgagttaatcttgtattttgatttaaaaattgatttaaagttttcaaagtaacttgagtatgagctaaatctaattttttcaaatttggtgtaaattttaaaattttatcataaacagttgaaggaaaatcaagacattcatggaatgataaattttcaatttttagattatcatttatagttaataaatcaaaataatcagttaaattatcatttgaaaaaccacaaaaatctaaagattttaaattttttaaattattgaaaatatattgtaaaatttcataacttatatcagtatcaacactttcacttaataataaagttttcaaatttttattacataattcaagacattttaatagtgttacatctgttaaatttgggattttataaattgattcaattgatttacctaaaccaacagcagtaaattcttggaaatctaaatattcaacataatcacctaattcattggtatttattaaatttattaagaatttactaaatgcaaaagatctaataaatttacaatatttgtattgatattgacgacaaagatataggaaacctgaattaactaacattaaattatctagatttgagaatctaccaagagttaaatttttagcagtacttgaaattttagttttctcaatttcattagtattagtattattattattattattattattataagtaccactaatattctcatttttagaaactgaagtttcattatatatggaaagctcatttataacatgaggagcatccatataataagcataagaaatgattttttcagttatttcaattgaaaatgggaataatttactaagtttattaacatcatctgtatttctaataagtatatctaaatttaacaaacttgcagttttagaaatatttggaattgaggatgagccttgatttgataattgttgattaatattgatattactattatttccagtagattcgatattacctaatgatgatattggtaaagttgtagccattcaaaaaagcgggtagttaaaagagaaagtaaaagagatatgtgaggtcatgagataaaagataaaggaaaagaaaaggattaatattaaaataaagatcagcaattagaaatgtcacttttgttttcaacggtgaagaaaaagaaaagaaatttcaattttccgcactatgaaaaaatttaatttttatctccgctttattggaagatttactgttattattaaggggcattggatgtgtgtgttaatattgtatattgtattgttttgtattgttattatgtatgggaggtatggaagaaggttaaccgttgggttttatgtagtttttgtaaaaaaattttataaaattggaaaataaaaatattttttgagataatatttttaatattttaatgtttgctaatgacctttaaaaattagtcaaaatgatcattgcctcaaatcatcaaacaattgaaaacaaacatttcttttttactcactacaaaccaatatggctgcttacgtcagcagaaatacaattacacaaggacaacaaaaatttgttttcgcgtaaaagggttaatggtctagtggtatgattcctgctttgggtgcaggaggccctgggttcaattcccagttgacccctttattttttataaaattattgctttaattttaattttactaggtaaagttaaatttttttactttagattactgattaaaaatttattgattttaacaatcaaacatccactggtggatagcatttcttaatttaatagatttactatatttttcaccaatgaaattaatttaattaaagcttatttatcgtatcgtatattatctaacatcaattatccctaaaaggaaattcacaaatcgagtaattccattcaattatccattgacaatagaatataaattgataaatccagttatggaaagtaattccagatgccaatgggaaataatcatgctatatcgcccactcagtgaagtgcttcaagtttcccttttcagaaggaggaagcgctaacagtgtttctattatttatttttgcgacgggggctcgtcattttagaggtttattgtgcggatcttattacccttttaggatatacgatgcattttttatctactaactatatctattccatcaattttaatctatagttgataacagaaaatattgttaaatttttcaaacaagtttaattcatttgaaacaatataaaagagatgttatgtctttaatttctctagtcaagtgtcaatcattcttcctttcttcttttcctctaatctccctctcttttctttctatatccaaacaagaaacaaatcacttgcaataatgaatagattatcacaaattgcaggtcaagcagcttcatctgttgctccattagcaaaaccagctcatcctttagatcctttatcagttactgaaattaaagctgcaactgatattattaaagaatattttgctggtaaaactattgcttttaatacaattactcttaaggaaccaactaaacgtgcttatttaaattggaaagaaaataatggtccattccctccaagaattgtttattatgttattcttgaacaaggtgttccaggtattaaagatggtttagttgatttagttaatatgcaagttttatctgttcaacctttagcaaattctcaaccaattttaactgttgaagatttagttggtactgaagaaattattagaaaagatccaaatgttattaaacaatgtgaaattgttggtattcctgcaaatgaaatgcataaagtttattgtgatccttggactattggttatgatgaaagatggggtgcaagtaaaagattacaacaagctttagtttattatagacatgatgaagatgattctcaatactctcatcctttagatttctgtccaattgttgatactgaagaaagaaaagttatctatattgatattccaaatagaagaagaaaagtttctaaacatccaaatgctaacttttatccaaaggatatgattgctaaatatggtaaaatgagagaaggtttaactccaattaatgttactcaacctgaaggtgtctctttcaaaatggatggtaatttaatgcaatggaataactttaacttccatattggtttcaattatagagaaggtattgttttaagtgatattcattataatgatcatggtaataatagaccaattttccatagaatttcactttctgaaatgattgttccatatggttcaccagatttcccacatcaaagaaaacatgcattagatattggtgaatatggtgcaggttatatgacaaatcctttatcattaggttgtgattgtaaaggtgttattcattatttagatgcacattttgctgatagagcaggtgatccaattactgttaaacatgctgtttgtattcatgaagaagatgatggtttattatttaaacattctgattttagagattcatttggtacttcaattgttacaagaagtacaagattaattatttctcaaattttcactgcagcaaattatgaatattgtatttactggaatttcttacaagatggtgcaattagattagatgttaaattaactggtatattaaatacttatcaattagatgatgaagcaggtgaaaaatctggtaaatggggttgtagagtttatccaaatgttaatgcacataatcatcaacatttatttgcattaagaattcatccaagaattgatggtgatggtaattcagcttcagttgttgatggttcagctgctgaagaacctttaggctcaccagaaaatatgtatggtaatggtttctatgcaaaatcaaaaacttttaaaacagttaatgattctttaacacaatttgaaaatggtagaacatgggatttatttaatccaaataaggttaatgaatattctggtaaacatccatcatataaattagtttcattccaatgcccaccattatttgcaaaacctggttcattagtttataagagagcaccatgggcacataatacagttcaagttgttaaatatgaagaagatagattttatccaagtggtgaacatgttcctcaatggtccggtgatggtaatattggtatgagaaaatggattggtgatggtagtgatgaaattgaaaattcagatattttaatgttccatacatttggtatttcacatttcccagcacctgaagatttcccattaatgccagctgaaccaattacatttatgttaagaccaagacatttcttccttgaaaatcctgcattagatgttttaccatcacatgcaatgacaacaagtgaagcaagaaaagctggtaataaagaaattgttagtttaactgatacaacttcaacatatgcatttaaggatactccaaagcaaggatgttgtagtagatttaccaaggaataattcctaatttgatattaatttgtttataatttgtttttttgtttatctctttaattttaaaatctgccagtcagaatatttttttataataatataatattaatatttttaatacactttaattgaatttatttctttaactatattacacttaatatacacattgatatagaattacaaattcccatcttgttttttaatatttataattcattcccaacaatttcatcaaattgactaaataattcttccatttggtcaggtgccaaatcttcatcttgaatatcattggtattatttaagttattatcaaatgtagaggcattatttccattgatgttagtatcggtaccattattagtatctgtattgtatttgtattattatttgtatttggattattattattattattatccaaaccttcaatatcttgcattaaatcacccatttcatcatcttgtaagaaatctaaatttaaatcatctaattcatcattttgttcaaaattcatataagaatttgcatttggatcattaatattattaacatcatttgaaccattaatatcatttaatccatcaataccattaatatcgttaagatcatcaagattattaagatcattattattattattgttgttggtatctgtagtcataagatcttgaagttgttcaggttgttgaggtaatgattgttgaggtaatgattgctgaggtactggctgttgttgagttactggtcgttgttctatattatttgtatcattatttaaactacctaattgttcatcagagaaattgaaatccattatatcatttgcggcatcattattattatcattatcattatcattattgaaagtcatttggaacattattcgaactaaaatcaaaattatcctaaatcaaggttcattatcatatcattttgattatttacatcattattaatattaatattatctatattgatatcattattatttgatgtaattttagattctggttcaagtttaatatcaataggattgttgttagtactattgttattattagtgttattatttaaagtattattactattactattactattattattattattattattatcaaatttcaatttttcagaatcttgtctaattctttgttgttccctcttttcttttaaaattgcttcctttgaattttttattttaacactttctaaaatatatttacaatttgataaatccatataataatcatcaattacttgattgaaaatattataatcatttgttaattgttctgataatggagctaataaagtatcattattatttggtattgtcatatcaatagcagttttagataatctataagtagcagcatccaaaatagcggctatagtgataaagacattatcagcagcagtgtctaataagttttccattgcccaaatataaatgttattctctaatatcctaactcttattcccttagatataccaactttaatcctatattcatgcagtaacaaaaattcaaaaaagattcaaaaaccgtattacataatcaaaaataaaaagacgcgactgcattacataatcacactaaaatattatatttatattatatcacaccagtacacttcactttatttcttaatacaaccaatcaaaattgccactgagagcgaaatacttgaattgcgaaaaaaatacttagcttagtatagttgaatgaatatactgaacgatacatagcatactttcattgaattttactatctcatttcacatccagaatgttcagacaaaccatcagagccgtctcaaaggttaacagagttaatgctgttagaacttatgcagaagctgcttcatctttaaaattatcattctctatgcctcatgatacaattttcacaaataaggaagttacacaagttaatgttcctgctttatcaggtgatatgggtattttagcaaatcatgttccaattgttgaacaattaaaacctggtgttgttgaaattttagaaggttcaaattcttctaaatttttcatctctggtggtttcgtttcagttttaccagattcaaaaatttcaattacttcagttgaagctttcccattagatgcttttgataaatcttctgttaaaactttattagctgaagctcaaaaaaatgctgcttcttctgatgaattagttgcagctgaagcttcaattgaagtcgaagttttagaagctttaaatactgctttaccataagttaattaaattaaattaaattaaattaaattaaattaagagaaagagtttaactctctatctatcaaaaatacaaatacaataattttactaagtttgattacaatttagaataataataataatcatattcacacaattataacacccctccaacatattacatctatttatttatttatctatttatttattaacttacttatttatttatctattataaatagtctgtttatttatttatatttcgtttaaatgtcatgaaatcattgatctgaattagtgtagtacagtatagtatagtatagtatagtatagtatagtatagtacttctattacttctattcttcggaaatttagtaattgcttcataatccaaatttccgcaacgcgtaattttcttgtaatcttttttaacatgcatgttttcttttttgaagagttaatgctcagttcaattctaactgaattatcataaaatatactaacatatcatcagatataccctgaaaaatggtatccacaagaagaaaacgtcatacagttagttatgatgattcaacagaactttctcaagttgaaaattcatctaaaagaagacgtgttataattgatgatgatggcgatgatgatatcgatgaagaaatggaaattgaagatttcttagatgattcaagtgataatgatgaatcatataaatcacaaacaaaatccaaatctagatcaaaatctagatcaaaatcaagtttaaaatcaagttcaaattctaaatcaaaaacttcaaaaagatcaaataaatcttcatcaaatagattaaataataaatcaacaacaattgcttcaaatattgatgaaattgatgattataatgaaaatccaatatttcaatcattaagtaatggtgatttaacttcatctcaattagctcaatcatggtttgatgattttattacaaatgatttaaatattaaattcgatgctttaaaagatttattaaattttatacttagatcagctggttgtattgttcaattgagtcgtcatgatgttacaaatagtgaaactgctaaggatacagttagtgaaattcaaacttcatttgcaagacaaaaatatcatgaatttcctatgttctatgctcctgttaataaaggtaaaaagacaaatattgattggaaagaattcccaattaacgcattatcttttatttcttctattatcttaattgcaagtgaatctggtattttatatgaagaagataatgaattgattgaattattattagaatggattggttcaatgtcaacttctaatattagagctttaagatatgtttcaacaatttttggattaaatattcaatcagttttatgtaaattatcagttaatatctcaaaatttattgataaatttttaagacaattaaagaaagaaaatgatagtttacaattgttaattgataattcaaagaagaaaaaagtttcaattcaaacaaagagacagattgacgctattgatgatagaattaaattgattaataataatgttgaaatgtataaaaagcaaaaaaaaattgtcgataattatattaatgatttctttaatacattgtttgctcatagatatagagatgttgcaagtgaaattagaattaaatgtgtaacctatcttggtgaatggatggatgattatcctgaaatgttttctgaaagtttttatcttagatatcttggttggttattaactgatcaagattcaaatattagagcagaagttttcaaagttttaatcaaaatttataagaaaagagttacagtttcatcattatcacagtttacatcatattttaaaaataaattaattgaaattgtcatttatgaaacagattttggtacaagattaaattgtttacaattattaaatgaaattattgataaaggttatttaaatgatgatgatattattcaaataacaagtttgattttcattgataatgaagatataatatacccattccaaggttcaaaattaaatcctggtaaattattaaaggaaatttcaaaatttttaactaaagttgaaactaatatgacaactgaatttttagaacagaaaagtattgaattagagaagctaaatgaagttttatcatttgattctaaagattttatcaaattcaaattcttactacaaattctatctgattcttatgaatattataatagtacatattgtaaggataaaatcaagtataatatagaaaattataaaattaaaaaatttacaaagatattccaatctatctatagtttgaaaagatataatgaaaacaatgaaagttttgaattatttttaaattatatcaattttgatttctcagctatatcaaaagatattattactgatgatttaagagagagtttagaattagattcaaattatcaatatttcttattaaatttaataaatgcatcatcaaagatttattgtgaaggctcaaacaacgaatatcataaaactttattcccatatatcaaaggatcaaaaaatgttattaatttgaaagattctacatattatgtatcaaaattattaatagaattatctaaaataacgaattatttccattatgatattgataaaatttcagtattgattgaaataacttgtaatatattaaataatatgtcatcattaaatatgaatgaattaaatattaaagggttgaaagatacaattgaacaattttacagatttttcccagttattaatttcccattaacaccacaaaagattaattttaattctgattattttaattcaattacttatcaatatattcaattatttcaaaaagtaaataatattgaacttgatttgaatggtccaattgatttattatttagtgaaacttcaatgtcattagatactaaaattgaagaaaatgatagtaaaataattgaatcaataaatagattatacattttacaattttcaatatcaacacaattggtatcacgtatctacaagaaattatcaacaattttaaacaattattcgaaatcattatatttccaaatctctaaagattcaacatataccaatgaagctgattcatacaatatttcaacacctatctcacaacatgaattattttcatttttacagatttctaccacatacataactaattcactttacaatttctacaataataaatccaagaatgaactaagtgatttaatatctgttaaaaatacaatttcttgtataaatacaattcaacaatcgttatcattgttaattgatactcaattacttaattcattaacaattgatcaattacatattatcttgtacatcatttattgaaaatgcatttacaatttctgcatttaaggcagaatatagttcattaactaaaaatcaacaactagaagatgaatttgacgaaactatgatgtcattacgtagttatatcttacctactattcaaacaaatattatgaaattatattgtattagagaatttcaatatgctgaattaattaacattgagaataaacttgaacgtgaagctgatgaagatgttaattttacaaaatattcagtatccaatgatgaagatatcgatgaagaagataaagaaaagaaaatacgtttatatgaaacttatctttgtgaaattgcatcaaaattagtattatcatgtaaattaaatttaataattgattcaaaggatgcagataagataactaatcgtattcaacttaattctaaatggttaaaaaatgaaaataaaaacataggtgaaatgtattcaagagtaatggcaggtgttggtattttaaccgctttagatgaggttaataatgaaaatggtaaaactaaacaatcaaagataactaatgttaaaataagtaaaaaacgtaaacttattgatgaagaaagtgaagatgacagtgaacatggtgaagatgagaatgatccgattgaaaattcagacgatgaacagatgaaatgaaaatgaagatgaaaatgaagatgaagatgatgaaattgaagatgaagaagaagttgttgcaaaaagaaagagagagtagtgaagaattacgtgatgaaaatgatgaaaatatggagtttagtgatattgatgatgattcagtcttattaccgcaatataagaacaaaaggacaaatactacatcgagtgaaattagttcacttgcatcttcattcccatttacacaataaataataattttgctcagtataatgataaatagataataaattttgctattataagttaatcaaacgtaagtcataaaaagtgtatttgtattatataaaaaaattaattaattaatattccaaaaaagagaggattcataaattttatatagtagaagaagtgaaaatgaaaatgttaaaacaatcattagttttgtagttatttgtcaagattctccgtaagaatagtttttcaaaaccaattaatttgctttattaatttcctaaatgtgaattttcactatgttgtatgcatgtatattgtatattatagtttcttaaaatgatttttcaacaatatcagaatttaaaggttgagtagcaggatcttcaggtgcaatatcgaattcttttcttgtatttggtcccttgataattttattagaaataacttttaatttatcaagtttttcaccacgaacaactttttcaatttcatctttattaagagtttcatattctaataaaccttcagctaatcttttcagttcaattcttctattatgtaataattctttacaacgtttctcagattcaattaaataatctcttgtttcttgatctgctaaatcttttaattttggtgaccaagtttcccatttatcacttaatttaacaggtccaactttatcactcataccataacttgtaaccattgctcttgccataccagttgcagatgataaatcagatgaacaaccagaagtaacattatttggaccatataacatttcttcagcaattttaccacccatacaaacatctaatcttgcaaaacattcttgtttagtgatatcatgtttatccatttcaggtaattgaaatgtaacacctaaagctctacctcttggtaaaatagttgctttataaagaggagttgcaccatttgtaaacattgcagcaattgcatgaccagcttcatgataagcagtatttcttctagtttcttcagtcataaccattgtttttctttcaccacccatcagtactttatcctttgcccattctaaatcattcatattaacatttaaagcattagtttgagctgcatgtaaagcagcttgattaaccaaattttttaaagcagcacctgacataccagttgtttgtcttgcaataattgaaggatcaacatcttttgcaagagaaacttttttaagatgatgttttaaaatttcaattctacctctaacatcaggtaattcaacaggaacaattttatcaaatctaccaggtctagttaaagctttatctaatgaatcagggaaattagttgcacctaaaataataataccttcagtttgtgagaaaccatctaattcaactaataattgatttaaagtttgcttagcgtaagcttgatcttttgattttcttttacctccaatagcatctaattcatcaatgaaaacaattgcaggagctctagctcttgcctttgtaaataattctctaactcttttagcaccaacaccaacatataattcatcgaattcagaacctgacatgaaaaagaatggaacaccagcttcaccagcagttgctcttgctaataaagttttaccagtaccaggaggaccagttaacaggacaccttttggtaattctgcacctaatgaaacatattttgaaggatctttaaggaaatctacaacttcctccaattcagactttgcttcatcaacacctttacaatcatcgaatctaacatcagaatcagtaacttcaacagatttatcatcatttgagccacttttaacaattgaaccattttcaactaaaacattaaaaccataataagctgcataagagattaaacctaaaggaattaaccatttaatccatctagagattgacatccaataagtttcagtaactataacatgaattggatcagtttttgtaccagtattagtattatttgaattgttattattggtatcattactattagaatttgaagtagtattatttaaatttggtaaagggatattattagtattagcaaaagtagttgccttttcaatattacccatttttaataaggcttctaaatataattttgaacaatctaaatcatttgatataccattagtttcatatcttgaaacaactatatgaggataacttgcatctaataaagatctataaaaagcagcttgtaaagcaggatttgataaagaattatttgcatcttgttctaaagcagctaaatcttgagttgaaggtatcgttgaagctaatcttttaaatgataatgaagataatgaagataagcgattataattctttaataaattataatttaaagttttagataatattggacgtgatataccccttgacgaacgtaataacatacgtacaggtgaagacatattgtatttagtgatataaaacgaaagttattaaatgaagttgaatgaaattaaatgaaaggccagaataattaataggtcaagggcaaatttattgacgtatagtaaatcatggttaaaaatgctcagctcgactgactgtggtgtaaattcggaattaaaagaaaaaaaccccaattctcggagataacaataaaaaacaaaacagacgcgtctacacaaaaatataaaaaaacaaaaaagacgcgactattataaaatgccattacgtaataatataataaattataataagatagagcaattccgaatttacccgcattaaccaatggaaattcgctaatttcaaataatgctattatttactcattttccgtccatttcactcttaatagttttgctattattatgatttatatggagggggggtgtttttcaatttcatctttaaaatcttcttactcttttcttctcttttcttttctgttttattttatccttctcttcttttacttcttttgtctttatttcctttaataacttacattaatataatcaaaaatgccagctccatacgaaaaaggttcagcaaagaaaggtgcaactttatttaaaactagatgtgctcaatgtcatactattgaagcaggtggtccacataaagttggtccaaatcttaatggtgttttctcaagacattctggtcaagctgaaggttattcttatactgatgctaataagagagcaggtgttgaatggtctgctcaaactatgtctgattatttagaaaatccaaagaaatacatcccaggtacaaagatggctttcggtggtttaaagaaagcaaaggacagaaacgatttagttacttatatgcttgaagctgcaaaataagtaattcattaattttgttacttattatactacttgaatatagttttattaattttattaaacattaaacattaaaaattattatttagatttaatttattcataatatattattatctcccttcattatattattattattattattattatttattcttttttattatatttacgtttttataaatgaaaaaaaaataatttaacgacatcaaaatctaatcttcttctaatatcttctactaatatattatatagactatacactatttcttcattatacgtaaactattgtccttactaccaattgcaacaatatgcttaatttcaccactttcttcaacttgaaccttatttgaaatactaattctactaatactatctcctggtaaatctctattttcaatagcttcaatttcttcaaattcattcttattaacatcaactctataaataaatatcttaccattatctaatccaataataactttaaatattccattattattaatcttaactgaatcaattgctgtaactgcaatttcaaattttatactaccataatttttaacttctttactctcattatccatcttccataatttaacttctttatctcttgaacatgttaaaaatgaaattacttctccaaaattaacccatgcacaatcccaaataattctactatgtgccttttccattattttaattaattcaaaattttcacctcctaatctcttccataatgaaaatttacgatctcttgaaactgataataaatattcatctttattatcttcatcatttaaactatatcttaatcttgtaattgttaaatcatgtgctgataatttatcttcacattctaaccatgtttcactattaaaatttctaataactgaatgtctactaacatttgatctacatgcacttgatataatcttaccatcatttgaaacatcaacggttgtaatctcaaatccatgtccatataatttctcaatttctggccataaagtatgacgttgtaaaatatcttcaattggtggttcaataatttctttaattccatctcccttatatccaccatcatcttcaccatcatcaccatcttcaacaccttcaggtttatcattctcagatttattacttaatcctaaaactggtacacttgcatattcaggtaatttttcaccatttaattgttcttcacctaaactttcaattccacaaaatttatttaacattgatgcaatactttttggcatatcaaaaactctaataattttttcatctcctgcactgataaatcttgtatcactaatacttttaactgtaatcatatcaaatccatgaatttgtggtctaccgaattcaaaccatttataactattttttggtttacaatataatctagtagtttgatcatatgatgtaactaataaataatcaccacctttagaccatgaaatatcactaattggtttcattggtccatttaatgtggtctttgtttggaaaaaagtttcatcaccttgtttagtccaacaacggaatgatccagttttaccattagttaaaataatttcaatatttaattctttattaattatccatttacttgaataaaatccaccagatgaaccagttgcagttgatgcacccttaattgcaagttcacctaatctaacttcaggaaaccaaacacctgttgatttgtcagcttgccatatcataactgaactatcagcacctgatgataataacattaattcttcttctttattagtatcacccttccatgaaacttcactaacccaatcatcatgtcccattaaaattgcatcaaggaaaatacagtatctatgatttaatgtctcaaatttatattcctttgatgttaataattttaatttatttgtttcaacataaactggtgtattggaatctttaattgttaatttccataatctaataattctatctaatgaaccacttgcaaatataatatttcttctaggatatgtaatatcatcaactgtttccattatagtttcaatctcaacactatcaatagttcttacccaatcatcatgtcctggtaatgaaagttttaaatcaattaaactttctgaaatattaactgataaaacattaataactggttttgaaccaccacacaatatgattctttcattatcactaattttaattatattcataaccattgcataatatccatatggtaattcaaaattacataactcagtaaataaatgttcttctctattgaattgataatagtaaacaaatcctttactatcaccaataataaaatctaaacattttgaatcgttcttagtaaatccaatacatgaaatactatcctttgtaggttttaaactttgtaataatctaaaaccatcagtttgatatttccatatattaacagtacctgtaatatcaccggaaaataaaatatcagttttctgtaaccatttaacaaatgtaatctcaccattcttgatattatttgatgattttaatgtttcaataacttgagtttcaactgtatatccattattatcgaaaattggacatgtaattgaaacggtattatttgaaccatatgctaatattttttgattctcattataatcaaagatcccaagtgatctattacaaccggcaaatatactctccatgttgtttgctaaagaggaggttcaagtgaaagaattataggtataaataaactattgacatagaaaatatttttttttcatcaaattaaaaaatgttcctcattttcgaatcctatgtaaaatggatagcaagctcaaaactacggagttgaataataatacaggattagtataatctatataatctagaaaaacgtatttatactaacatggtaatagatcaataccattttctaaccatcctggaccagccaggatcgattcaatactacaaccttcattccaaactcttttaacaatatccatatttgtttgaattgtacccattttaacattttcatataaagtttgtaatgctttccaactatgttctctattattatcagctgaacaaactgcaacataaaaaattggccaaaccagttgtgtaataattggtgaagttgaagggattgtattataaactgataaaaattcagtaattattggaattgattttgttgatttaatatgatatcttggaattgcatcagggaattcatttgatgaaagaaaatttctattttgttcattccaataaggtaatttattaaaataatgtaattctaactgaattgtaagtaaaactcctgataatgcccataattgaccacattttaatctatcaatataagtaaatgttgaaccatgtggtaaaacatataaaacatgatcacgataatgtaaaaatctatcacgtaaatcaagtaatctttgataaaatatacgtacatcttgtaataaaattgatttttgtgaaaataacatcattgtatcctgtctgaaaacactcatatcatataaaactctaaaaattccaactggacatccattcattttatcagttgaaattatatcagtactttcaccaaaccattttggatcacaatatggtattctacaatctggcgatactaatgatgacactgtatcaaaccatgataaaacacataataatgattgtgattgttgaatttttttcatttttttatgaaataatggatcacttgcaattgatgatgctaatttaagaaacattctagctaatgctgatctaccactctcaagaaccgcaaataaaagatgaacgtataataatagtaaaataatcataaaatttgtaccttttttcttatttgattcagatttaattttatcaataattttaggtacatctaaaccaacatcttgggtatcatctaaacttatatttggctcgttatcattatcactcccacttccacttccactactactttcatttttcatattattattactctcattattttcatttttattattattatcattttcgttatcgttacaattttcatcattttcagatgttataccaccagctctaacatatttaattaaatattccattgtattatttatatgcattaaaccttttttataaaattcatcaccaccattattaacatataaatgcattgaagaaagagaaaggaaacatgatttggctaaatccattgaaccaaatttcaacattaattgaggccatggagcttgtggatgggcatctaaaaggaaaataactttttcaaagaaatgcttcaatatatgactttcttccttctttttcaattgaggagcaggtaaattatcaatagtaactgaatttaaattactcattgtcattgaatgaacatcaactggaggtggtaatgatgaaacattttctaatgtttcagagaattgtgaatcaattgaatttaataattcagtatcataattatccaatatataatctaaacctgataaaaatgcatgttcaaattgttgttcattattgaagtctaattcaaaatcagtttctgaaactgtagagctagtaggtaaacttgtagttcgttcaagaatctgtggtgtctccggtgatatcactaatgaattattgccaatagtatttatggtatttatactatttatagtgtttatactattcatactattcatactattgatgctactgatactattaagactgttcatattcttcatactgacactattgacactattactaggtttcatttgtgtattcattttaactgtatcatcactagttaatttcggattaagttttgatggattatagatataccttgaaggagaggaagcattttgctttggacgacccttaaatgagattttattattaatattattcctatcatcactatcaacatcaaaaactaatctcattccataaccttcacattgtctacctgaatcaacacaattcttacaaaatggtttcgtctcatcacatttacgacgtctacgtttacacgtaaaacaaccatttcttgatctagttatctttttccccttagattcagccattttttgggtattcagaataaatcaattgagctatttgtgagactattcataaaatgaatgcttatctatattatgttgttaaatcagatttccacccaaaaggaacttatcgacatcagcaaatgataattgaaactactgataattcatgttgatagtggatacactttcctaaataggcatcttattccgccagccggaatttttttttcactactaagattcactaatattaaactctcggattaaattttataagggcattttgtaacgattattaaattatgttatttgttaggaattgatattaatatttcattaaagaaatttggttcaaattttataaatacataagcgtataaaagatggaaattataaatataagattaagtttaagtttaaaataacaaacaacctgattataatttttgcatagcagcaacatccatagattgaacccagtcttcaccttcttcaattgcagcttgtaaatcatctaatgaaactttatcatcttcaacgacacagttaatttgtaatttcttaataccgaaaccgactggaatgaaagttgatgcaccccaaactaaaccttccatttcaatggatttaacgtggtttaacatagcatctaaatcagtttcatcatcccatggcttaacatcaagagtaacaatagatttagcagctggctttggaccctttgcagctttcttttcattatatgcagcaattctttcagcctttaatttagctgcagcttcatcatcttcttcatcatcagaaccaaaaagatcgacatcatcatcatcttcttcttcagcagctggtgcagcttcagattctgcagctggtaaagtttcaaattcttcggagaatgaagcaatgtggttgaaccatcttgagaatgatgggtatgcagtttggaaagccttgtatgcagcaacatcagcttgagatggtgcagtactataataaataaagataataaacagattctatgttagtattatgattcataaagaatttatctcactattcttattatcattatatttatcaggtgtaagtaaagattttatatttattatttgatatttgttttgaaatgtaagaaaaataaaaacaaaaaaaacaaacatttttggaaaacaatagctcagtgaaatggctgcgtcaacaaccttctttttgatactcatacagcgggtcttgagtccgcctcataaacatggaccaaagaattcaatcatcattgcgaataattccattaattttgaaagaaaattaacaaatgaaaacaaaacaaacaaaacagtcatatcaaataaacaaataatttcactacttaataataataatgataagaataataattgtaaataatttgatttataattttaatatacatacccttggacgtaagagttatcctttaagacagcatcaagtttagcgacttgttcgattgtggagaagtttgtgaaagacatttgcaagaggaagtagatcaaagaaactcaaatgaaggagaaagaaggttcatttaaagggaaattaattagaaattaaggaaaaacgtgaaaaacgtccattttattaatgcagaaagccacgaccctctttcacagtgagggtttcttgagaaaaagtggaaaaagtggaaaaaatttggaaaaatttgaaaaaatttgcgtttcttttacagtgagtctagaaaattaataaatttctcgctcgcgacaatatttctgttgtagacatggggctcaactttaacctcattagaggtaatggtaactgaaagcattttgctttgactagatttaagtaatatctcattcattactgctgtgacatggtcaaatgatttaagatattctttatatttatctggatacatggatttcataaatggtaatatatctctttcaatagacatttgtttaattgtacgtatattgaatgaataatctctaattccaataacaacattcttagttgatgaataatgacattgaatagctaatctaaataaaaatgaatcaaaataattgttacctcttgataattgtaataaaattttgaaattacttttaatgttaaaacttggaattgatccacgacataaaatcattttaatttctacataatcatgaggatcatttaaatatgcatcaacttcagaaaaatgaattgataatctatcagaaacagttagttgtatacattactttaaatgaagatgtattattaacagttttataatgttgtccatggatcagtaaatcttcaaatctaattccaacataattcattttcctatcttgattaattcttgtctccgtattagcaattataaaataacctttatgatttaaaacataaaattttgatgctctacgtacttgaaatatattgataaaatgatgatggtgtgaaaattccaacatttgggattggtttaagtattcaaatacgtttgcaaaaatggttcatttttacaatcattctctccatatactaccggtgtatagttattaaatccaagtttagtattccaatgacatggttgtttaggtataatgcactttcctaattgcgatctatcgaatgtaaccttttcctctgtaatagaataaccacattcttcctttagtataggaagtggatttacaggtggtgaatcttcgtaaaacattccactgttgatgataatatataggagaaatcaagtcttacggaggctcaatagagttaattgttacgattaatttttcactgtactataagtctcacagtttaacaattttttttatgattttcatcccctcgccgtaaaggctcatcacaatttatgattatcacggtgtatcaaattattaaattaactatagtttattaacatattatcttctttatcaacaatgaaaacaccaatttggccaagtaactctcctgacgtttttgaaatggacgcactccatgacgttcataacaatatgcgtcaaagaattttcaaatatctaattcaaagaggttacaatacagctgcagctgaatttgcaattgagacaaacaacgaaacagccaccactttaaagccaaatttaacatcaacagcaccgccgcaatcagaagtttatgatcgacttcttttacaagataaccctgatttagcagatcaatttcatctctctgaggcatacaaggcagcacagaatggtgattatgaatcaactgttgcatctattaagaatgtcagtagtggtggtggtggaggtattgatcaactcatgaagtacattgtggctggtgatgaggagaaaccggaattcactaataatttacaaggattccgaacaccgccacatcctcaccaatggcgtagcagctgcggtgtatgtggcgcagcacaaggaaaatgaggaaaaatgaaataaaatgaaaaaaatgatcggaaaattgcgaaacaacaaattgcagaacgaaatttccgaaaacacagggtactaaaatgaccaaacaccccggggaaccgagaccggcagcgggactgtggggtcgtcgcagatgatcgcttacactgaacaatttgagagtgaaattttttatctagttattgcaattatttgattaccaatctctgtctcaataagtctttatcaatctgtttggctaattttcactgtatttcagagtcaatcaattcaattagttggttattttcttctgataactttctagttttataatacattacttataataatacaatagtataataatataataatacttaaaaaaatatatacaaatgcccaatgatgaaccagtgccaatcactgtttcttcacctccaacacattcactgcattatgttttacgtagtggtttagcaggtggaatggctgggatatctgcaaaaacattagttgcacctcttgatagagttaaaatcctatttcaaacaaataatccccattattcgaaatatgttggttcttttaaaggtttatttaatgcaatttctcatatttattcaataaatggtataagaggtctttatcaaggtacattcaggcaactctactgagaatcttcccatactgctgcaattaaatttgtagcatatgaacaatatagatcttttcttatacctgattcttcatatgaaactgcttcaagaagattactcgcaggttcattagctggtatatcttcagtttttttcacattatccattggatttaattagagtacgattagcttttgaaactcatcaacataattatcatcataatggtagtaaattatttcatactttaagacttatctataatgaaaattcaaatttgaaattaccttatacaacaggtggtatacaatctttaccaaataataattctgcaattactaaatttattcattcaactaatataccgaaaaagtttccctttcattttatcaatatcaaatttttatagaggttttcataccaactattttaggtatgattccatatgcaggtgttagcttttattctcatgatttattacatgatttattcagatcaaaatatttagctaaatacacagtttcaacttcaattcctgctcgttttaatgaaagtagacctccgttaaatacttgggctacaacttattagcctggtggtggcgccggtatgttagctcaagcttctgcttatccatttgaagttatacgaaggagaatgcaagttggtgcagttactgatccttcaggtcaattccattcaatatcttttactgcaaaacaaatttataaacaacgtggtttatcaggtttttatgttggtttaggtatcggtttcttaaaagttatacccatgtttgcttgctctttttatgtttatgaacgttgtaaatattatctcctgatatagtaaatataaatttgaaaactattcaactatttatttttttgtatattatccctataaatattattatatatatatatatgaatctaattaactattcaaaatccttttcatcgattccagacttttcacacatactacgaaaaataccttctttattttcccacaatgccttaggagtatcaaattctgcacactctcccttgtccataactaaaatacgatcataattcaaaatagttctcaaacgatgtgcaatacataaaattgtacaatctttgaacccttgtgcaattagtattctggaattctagcatcagtttcgtaatcaacactacttgtagcttcatcaagaattaagatcttactcttacgaatcaatgcacgacataatgcaataacttgtctttcaccaagtgaataattagtaccatcttcttcaacaattgagtctaatgtaaaatcaccaataccaccagatgccatttctaaagcttcaattaatatagaatcatcagtttcttcaaatggatctaaattagaacgaattgtacctttaaataacactggatcttgtggaataattgctaatttggatcttaatttaaataaaccaatttcactgatattaacaccatcaatggtcatttcaccacactcaatctcactcaatctatacaatgcagtcataattgttgatttaccagcaccagttctaccacagataccaatcttttcattaggtttgatatccagattcatattcttcaaaacaaatggcaattctggtctatacttcaatgaaacatctttaaattggattttaccatgctcaggccacgatggaggtaatgtttgatcaacatctttttcataaggagcttcttgtggtaattcagttgcatattcacaaactctttcaactgatgatgataattgttctaattgaccaatagctcttgtacaagtaataatttgcatagaaaattgaattgcatatgagattaataaaccggcaccagctgcagaaattggatatgcatgagaaacacataacattgtaacaatcaaattaacagtagctgctgcaccatgtaatgggacagagaaccatctcattaaactaatattggcaaaataagcttcattcattttattaatattgaaatcattacgtttcataaatctttcacatgaattataaattttaattgttgtaagaccctgtaacatctcatcaaaatttgaaaaaacaaatgatctactaacaccttcaattcttttaacttctcttgatgttgcttgatacacgttaaagaaaacaaaaacataaataatcaaaaatggaataagaattgcaaaccatggcaaataaataatacaaagaatcaagataccaataacatttcccaatcccatacatgtcaaacgtgcctgttctgcaatctcattatctaaaacatcagtatctttagtaaatctgttcataattcttcctaatggtgtagtatcaaaaaatgccattggtgcaaacataattcttctcaaacaactaatatttaaaacttttgaagctttattactaatgaaaacaattgtacagaattgccaaattgcacataaaacaaatgaacatgtaatcatgacataaattccaatataaaatggattatcatattgtttaaatttccttaatgaccagaaagataaccaaacattttcaaacaacatgcagaacgtagtcagagaaattgcacaaagtaaattaataagaactacctttggaccaagtttaccacatccagactttaaatattcaacaaacattgcacctgaaatactattggtgttgatcttctcagcttcaattgttttacctactttttcatcctttgtagtttgttttctaattagtttcaattcttcagctttgacatcttcatcttcatcttcgtcattagcttcatcttccttttcatcttcaccttccatttggaaatccatcaagttttggaatccaggattacgtgcaataagttcttcgttagtaccaatatcaatagttccatccccattcatataaataattctgtcagcatctccgatcaaagacaattgatgagttgctaagactctagttttgttacccaaaagacctaaaatacattcactcatgatatgtttaccaactttggcatcaacggcactcaaaacatcatcaaacataacaatattgtattcatccatagtgtaagcacgatagacagttctagctaaattgatacgagctttttggccaccactcaagttgacaccacgttcaccgatttcagtcatatcaccagcaggcaagatttcaaaatcactggttaatgaacatgactcgataactgttttgtaaatttgtttatcataatccaaaccaaaggtgatattttctctaacagttgtattttggatccatggatgagagcaaagaattaaatcaccattaatatcgataccaccttgaattctgttaatatcaccattgattgcagctaaaagtgaagatttaccagagccaatcgaaccagtaataacaacaaactcaccatgtttgattttcaaattgatattatgtaaaattgttttatttattgatgtaccatttgaatcaacagaacccttttcagaactgttatcagttttctccaattcagtagtggaatcagaatcagaagttgaaagtatatcatcattccatgtaaaacttccattggtaattctaattgaatcaacttgtttattaaattcagtcttaatgtattttagatcaggaatttcttcttcagccaataataaattttgaatacgcttgaaagcaattagtgcatcaccagttgaacttaaagctaatggtaaaagtgaaatatgcagcgttaaaatattgaataaagtgagtgaagagaatatattggcagcatttcttaaaccatgattttggccatacatacataaaaaaccaatcattgctgaaactaatggcaatgtaactgcacaacctgtaatgatgtttctagcaaattgaatttttaacataacgttcatttctttagatctaatttgagtaattaaattcaaaaatggaacttcccatgcataatattttaacattttcatattgtttaaaatttccttaatataactaactcttgcatcagtttgaacattaacatcttttctccatgccattaattttttagtaaagaagaaaaaacacatcgttgcaatcaaaaaatacccaacaccagctaatgatgcacctcctaaatgagttgctaacaatgcaatagtaattgctaaaccaataggtaaacatattgcaaagggtagatagcttgcagctaaatcaattttgtaaacgtcattaccaattaatgaagtaatcattgaatgtgaataaacagtttttgaccttttacttaatttcattgctttatcatgaatcaattttgtaaggacacctttaacttcggcaccaaaaacacctgctttattaaaaccatgtcctgaaagaacaccaacaaaataaacaatacatgcaacaccaactgcataaccataaccttttttacttggattttgattatgggttaaattattttcttgaacataattgataagtgcacgaatttgtaaagtatttaaacctgaagcaatatcactgattactttgaaaaggatagctaggatatattgccaacctaaagcactgaaaattgcacgaaatacaagatacttaggatatttgaaatttggatcattttttaagttttcacggttttcaaaagtatcttcaattccaaatttttttaaatattttctttcatgaagatctttcagtttttcaaattctttggtaacatattcagcagttgtagaaacatcgaattcactattttctgcaatcttgtataaatcttcaggtacaattgttctaagataaccgacatgaattaaggggtataaccaagcataaaaactttcagagataagattgttatgatcatatgaataaagagttctctcttcttctaaaggaattggggggacacttttatcccatagaagaaaatgtaaaattcttttctgaggttgaatacgaggatctttagcagtacgtttttcagcatcttcacgtgtatacttgtgatttgatgttgttttaaaagatatcaagtctttattagttttaattctcatgtttatagatgctttccaatattattattattattattattattatattatgaaagtggaaactatccttccatgctaagtttactctacaaaggtttaaaaagtaaaagtactgggaataaactatcagagattagaaaaaaatagattaaataaaaaaaatcaatcaaaatcgaaaataaaccgttatccagataaaaatagttttattatccatggatccaattttttttgaggggaggaccttttctatttaaactaattctcagggctcttagttccaatcgtgaatttaattaactgtggtgttttccccttttcggccgcacgaaccagagcggcagttactttaccgcttgcttatctttctacttaatctactgaagaacccctggcaacgactttatcatcttcaaatcaattacttcgttcaagcacaaatgatgtatactgtatagaatcatgttgaaattcgtgtttaattaattgtgtatgcgtatggctataatcaataggtatattgaatagaaggccgtagcaatggctgtacttaacaataaagattttgactcatttaaaaaaaatgattttataaccaattattgtggcatttatcacaataaaaatagcttttctaaaaaagatgactcagaagaaagattttggtcatattttattgatattttttgacatcggcacatcggtaattttgaaaatatttgattcaaagtatattaatctattacatgacttaagatcactattatatatacagtctttttaatcaaatgagactaactagtaatatgtaaaaatcgaatgtatcttagttaagtccgttgtaacttcattttcaactacccgtaaaaattttgaatccccagtatttttattaagcgcgggggaagtttactgggaactaaagaatcatcgccggtggctataaataaagttacagcggactaaaccaacatacatttggttactgaatattactagttagtctcattcatctaaagagactgtatatatactaaaaataatctttacaaaaaatctaactattcaaaaatccttttcttcaattccagacttttcacacatactacggaaaataccctctttgttctgccataatgctttaggagtgtcaaattctgcacactcccctctatccattaccaaaatacgatcataattcaaaatagttctcaaacgatgtgcaatacataaaattgtacaatctttgaacccttgtgcaattgtattttgaattctagcatcagtttcgtaatcaacactacttgtagcttcatcaagaattaagatcttacttttacgaatcaatgcacgacataaggcgataacttgtctttcaccaagtgaataatttgtaccatcttcttcaacaattgaatctaacgagaacttttcactgttttcagtaccacaagctaaatcaagagcattttgtaaaacatattcatcagtttcttcaaatggatctaaattagaacgaattgtacctttgaataacactggatcttgtggaataattgctaatttggatcttaatttaaataaaccaatttcactgatattgacatcatcaatggtcatttcaccacactcaatctcactcaatctatacaatgcagtcataattgttgatttaccagcaccagttctaccacagataccaatcttttcattaggtttgatatccagattcatattcttcaaaacaaatggcaattctggtctatacttcaatgaaacatctttaaattggattccaccatgctcaggccacgatggaggtaatgtttgatcaacatctttttcataaggagcttcttgtggtaattcagttgcatattcgcaaactctttcaatcgatgaagaatattgttcaacttgacctaaagatttggaaaatgtgattagttgtaaactaaattgaacaatgtaggaaataagtaaacccgaagaagcagcagaaattggataagctctagaagcacttaacataccaacaatcaagttaacactaaatgatgcaatatgcaattttgtagcaaaccaacgttgaactccaatggtataataataagcttcattcatagtattaatcagtcttgtatttttatcaataaatctttgatctgaagcgtataatttgattgttgacattccttgtaatacttcatcaagcgaagaaaaaacaagtgatctagatgtaccttcaattcttttaacttctctagcagtagattgataataattaaaacaacaagtaacataaataactaaaaatgggataccaatagtaaaccacggcaaaaaaatacaacacattataataacaccaaaaatattaccaaatccatacaaacataatctagcctgttcagcaatctcattatctaaaacatctgtatccttggtgaatctattgatgattctacccattggtgttgtatcaaaaaatgccattggtgcatgcaaaatattattaacagccataatatttaataatctagatgatctgttagtaataaaaattatagtacaaaattgccaaatagatgttataacctccaaaattgtaaacataacgtatattccaatataaaaaccatctgaacgatcaacaaatttacgagtagaccaaaatgataaccaaacattaacaaaaatcaaacaaaaggttgcaattatcaaagacaggaggaaatttggcaacataaatttcaacccaagggaaccacacccagatcttaaatatgtaatcatcacattcaaaggaatgccatttgttttagaagcttctgcaattattaactttcccttttgctcatcaaccattgtagtttgttttctaattagtttcaattcttcagctttgacatcttcatcttcatcttcgtcattagcttcatcttccttttcatcttcaccttccatttggaaatccatcaagttttggaatccaggattacgtgcaataagttcttcgttagtaccaatatcaatagttccatcaccattcatataaataattctgtcagcatctccaattaaggataattggtgtgttgctaggactcttgttttgttacccaatagacctaagatacattcactcatgatatgcttaccaactttggcatcaacggcactcaaaacatcatcaaacataacaatattgtattcatccatagtgtaagcacgatagacagttctagctaaattgatacgagccttttgaccaccacttaagttgacaccacgttcaccaatttcagtcatatcaccagcaggcaagatttcgaaatcactagttaaagaacatgactcaacaactgttttgtaaatttgcttatcatagtctaaaccaaatgtgatattttctctaacagttgtattttggatccacggattagaacataagataagatcaccataaatatcaacattaccatccagcctaggcatatcaccattgattgcagctaaaagtgaagacttgccagacccaatcgaaccagtgatgacaaggaattcaccttgattaatgtttaagttaatatttgataaatgataatcagaaccattcaaagaacaagatgaagaggacgataataaactatctgatttgattttttcagttggaatgctaataatttctttaggagactcagctgaccaattgaacagaccatttctaatagaaattgtagttttgctagattcttgtggatatttgttataatttggatcttttttagtttcagttgctagaagaaaattctgaactcttgagaatgcaatccaagcatcactcgctgatgttaaagcggtaggtaacattgatacatgtccagttaaaatgttgaaaagagtcacagatgaaaagattttagctgcattttttaaacctcctagttgtccatacattgctaaaaatccaattaatgcagatacggttggtaatgtgactgcaataccagtaataagatttctgaatacttgatttttcaacataatttccatctcttgacttcttaattttgaaattatctttgcaaacggtttttcccatgcataatatttaatcattttaatattatgcaaaacttctttaatacttttaactcttgcatcagtttgaatattaatagactttctccatttcataagaaatttcatcgagtagacaataaaaccagttatcaacataaaccatgcaataccagaaagagaagcaccacctaaattaactgccaataatgcaatagtaatacctaaaccgattggcaaacacacaatgactgggaaaaagtttgctgctaaatcaattttagatagatcattacctaaatatgctgtaacagttgagggtggatatttgattcttgattcacgatccaatctaaaagacttatccaatagaacttttgtcaaaacacctttaatttctgcacctgcaaatgaaacatcattgaaatttctagcatataagagccctgtagcaagaacagttattgcaacacctaatgctaatccatatccacttttaccaacatcacgaccttctgccttattatgaacataatcaatcaaagctctaatttgtaaagaattcaatgctgtaccagcatctgcaacacctttgaaaatgagtgcccaagtgatatcgaagaaaaaagttttgtatagtgctcttacaattaacagttttggatactcaaatttgtcatctgtcaataaattttcacgattctctggtgtatctttgattttattacgcttcatgtattttatttcatatttatatttgagatcattgaaatgtgataaaaataagttacattgcttttcaacgtcataactagatcccttaggaattttgtataaatcttgaggttggatagttcttcggtatccaatataaagaattggtttacaccaaaggaaaaaagtttcactgtaaagattggtctttctgaatgggaattcaattctttcatcttctgttaaaactggaggaatacgtttatcaagcaacacttttgtcattaaccgtttttgcggttgaataaggggatcattggcatttcttttctctatgtcttcagtttcataagacggatatttggcattccccgtcaataaagttgtaggtatcatttggtagctttaactttcggtgaagtatataccaaactatagctttttttaaacaatttgaaaaagtaacagatacttaatgtattatttttcattcaattgaatttttcaatgatcaacattgtagttttgcaagttcaatctaagattcactatcaataatgtttatcaattgaagatacactgccttgcttatttggtgaaaaggcgatttgctaaagaattactagtaagggaaattggttgagaaaatatttgacatgaaattggtgtggcaactgtggattcttttgaggaggacccacaccatgagaatataaaaactccatgatatccatcttttatcaaacttaccggtaaacttacttagttctttttaaattatactttatttatatagtgtatacacctatattctataaaagcaatgatactacaagggaaagtacaatttttttcttgattattcgaaatccttttcctcaattccagacttttcacacatactacggaaaataccctctttgttctgccataatgctttaggagtgtcaaattctgcacacttcccctctatccattaccaaaatacgatcataattcaaaatagttctcaaacgatgtgcaatacataaaattgtacaatctttgaacccttgtgcaattgtattttgaattctagcatcagtttcgtaatcaacactacttgtagcttcatcaagaattaagatcttactcttacgaatcaatgcacgacataaggcgataacttgtctttcaccaagtgaataatttgtaccatcttcttcaacaattgaatctaacgagaacttttcactgttttcagtaccacaagctaaatcaagagcattttgtaaaacatattcatcagtttcttcaaatggatctaaattaggaacgaattgtacctttgaataacactggatcttgtggaataattgctaatttggatcttaatttaaataaaccaatttcactgatattgaacatcatcaataggtcatttcaccacactcaatctcactcaatctatacaatgcagtcataattgttgatttaccagcaccagttctaccacagataccaatcttttcattaggtttgatatccagattcatattcttcaaaacaaatggcaattctggtctatacttcaatgaaacatctttaaattggattccaccatgctcaggccatgatggaggtaatgtttgatcaatatctttttcataaggagcttcttgtggtaattcagttgcatattcacaaattctttcaattcgatgaagaatattgttcaacttgacctaaagatttggaaaatgaaatcaattgcatactcaattgaacaatataagaaataagtaaaccagatgatgcaggctagaaatcggataagctctagaagcacttaacataccaacaattaaattaacacttgcagaaacaccatgtaatgccatagcaaaccaacgttgaactccaatggtataaaaatatgcttcattcatagtgttaatcagtcttgtatttttattaatgaatctttgcatctgatgaatataatttgatagttgcaagaccttgtaagacttcatcaaatgaagaaaagacaagtgatctagatgtactttcaattctcttgacttctcttgcagttgattgataatagttaaaacagcatgtaacatagacaccaaggattggaacagcaattgtaaaccatggtaagaaaatacaacacattataataataccacacatattaccaaaaccaaaacaacacaatcttgtttgctcagctatttcattatctaaaacatcatgtatcttttgtgaatctattgatgattcttacccatcggtgttgtatcaaagaatgccattggtgcatgcataatattattaacagcttttatattcaacatagtggaagatctattggtaataaaaataatggtacagaattgccaaattgcacataaaacaaacatgatagtgatcataacatatataccaatatagaaaccatcagaacgatctgtaaaatctatcacttgaccagaatgataaccaaacattagtaaacaacatacagaatgctgtaaaagtaattgacagtattaaatttggcaacatgaactttaatccaactttaccacaaccagatctcaaataagtgaccataacatccaatggaataccatttgttttagaaacttcagtggtaattaacctacctttttcttgatcaactacagtggtttgttttctaattaattttaattcttcagctttggcatcttcatcttcatcctcatcttcattattagcttcatcttccttttcatcttcaccctccatttggaagtccatcaaattattaaatccagggttacgttcaataagttcttcattagtaccaatatcaatagttccatcaccattcatataaataattctgtcagcatctccaattaaggataattggtgtgttgctaggactcttgttttgttacccaatagacctaagatacattcactcatgatatgcttaccaactttggcatcaacggcactcaaaacatcatcaaacataacaatattgtattcatccataagtgtaagcacgatagacagttctagctaaattgatacgagcttttggccaccactcaagttgacaccacgttccccaatttcagtcatatcacctgcaggcaagatttcgaaaatcactagttaatgaacatgactcgataactgttttgtaaatttgcttattataatccaaaccaaatgtgatattttctctaacagttgtattttggatccatggattaggaacataagataagatcaccataaatatcaacattaccatccagcctaggcatatcaccattgattgcagctaaaagtgaagacttgccagacccaatcgaaccagtgatgacaaggaattcaccttgattaatgtttaagttaatatttgataaatcattgccagtgatagttaaagaaccagaggatagtttattttcagttgattcatctgttgaaatggatggtgtataattttcagaatctgataaccaatcaaatataccatttttgatagaaattgcagttttgctagactcttgtggatatttgttataatttggatcttttttagtttcagttgctaaaaggaaattttgaactcttgaaaaagcaatccaagcatcactggcagacgttaatgcagttggcaacatcgcaacatgagcagttaatatattgaaaagggtaacagaagagaaaatcttagatgcatttttcaaaccaccaaattgaccgtacattgataaaaatccaattaatgcagaaacagttggtaatgtaactgcgataccagtgataaaatttctaaagacttgattcttcaacatgattgccatttctttatttctaagctttgatatcaatttagtgaatggtttttcccatgcataatacttaatcattttgatattgtttaagacttctttaatacatttgactcttgcatcagtttcaacattgatagattttctccatctcattcaaaaatttagtagaaaagacaatacaaattgtgattaaaatgaaccaagcaacaccaggaaagtgaaggcaccacctaaattaactgccaataatgcaatagtaatacctaaaccaattggtaaacaaatgacaaaggggaagaaatttgttgctaaatcaatctttgataaatcattacccaaatatgcggtgatagtagatggagggaatttggctcttgaatctctatctaatctaaatgatttatccaataaaactttagtcaaaacacctttaatttcagcaccagtaaatgaagcatcattgaaatttcttgcatataaaataccaaagaagaaaacaatacatgagataccaacggctaaaccataacctttcttaccaacatcctgcccttctgcctttcgttgaacataattaattaaagctttaatttgtaaagagtttaacgctgcaccaacatctgcaacagccttacaaagaactgcaaaagtataattgtaaaaataagttttgtacaatgctaacagaactaagttgcttggatatttgaagttttcatctgttaataaaccttcacgattttctggagtatcctctatattatgctttttcatgtattttgattcacaattacttttaagttgatggaaatgagctaagaaaatatctgaatttttttcaacatcaaaatcagaacctttggaaattttatataaatcttgaggttgaacagttcttctataaccagtttcaagaagaggaacacaccaagtgaagaaagtttcactgaaaatattcgttttacgaaatgggaattcgattctttcttcatctgttggaattggaggaattcttttatctaacaacaatctagtcatcaatctattttgcggttgaattagaggatcatcagcatttctcttttcaatatcctccgtttcagtaatgaagagattttactctcttatttgaaaatagagtttttaaaaccattataatattagtatagtaatgtttgaatatatgatagttttcaaatgaaaagttaacttttgtttgagttctagcttatttactatacaagtcaagtcctggtatttagttttacagaaagaacagaggtcaaacaccaaaagaacaagcaagaaaggagaaagaatgatgcaagggacaccaaaaagaaatatttgttagtgattcacgttatatcaataggtcgtttaagtggaaaattttcagttgcggaagcgtatcgacccgcttttctttgaaagataagaaaaaaaattatttgaccgcaattttaagggtcctttctttccaccgtggcacatgcgtgtcagtttggagtggtaattcccgcgtgtagagaagttaagacttttcaatatcttattatggaaagtaattgtagttataaaagatgtataaaatagttaagaaagaaatgtggaaataacccatataataacgcagtctgtaatattaatgataatcaccgttgtaagagacggagtgcagcaccgattgccatgtaaattaagatactcggtagtgttgatttaagtgtctgtggtggtggtgactccagctgtggaaaatgtgcaattaattgtgcattattaccgtacataaattcaccaattggcggtggtggcggtggtggtgcagtaggatgctggtacattaattgaaaatgaaactggccgttgtattgatttatttctttttgaaacacatctatgtttaattaaactttgtgacttgacacgttttttggggatagagaagtttccgtattgctctctgtggcgttttaggattatatgctgtaagttgtgaatgttgtttggctactgccattgtgctctgatagtgacaaaaatctgtttcttttgtatctattaataaaaatactactcatcatttttttagtgttttcccttttgccttttatagtaaattcttcgaagtaaaatgtgatgtgtcacataaatgtagttcaatgacgaaatgatgttactatcatccaaaattgctacctatcgcaaagtacatataatacttcctaattgggaaaagtgtcaaatgcgacttgtcgaccccacatttttcactttaagaatttctttgggatttggaaaatctcgcaaattgtcaacatgaattttaataaagtcagaggtaaccacaattttaatttttaccccgatcttttaagtttgataaatttgaagtgaatcctcttaaaggtgaattcatcacaggtgccgttaggtatgtcgcagtctgaaagcatggatacagagcttaatagttcccaaacttactaatatgagctcagctaatagttctggaaggaatcaatcagtagagctggataataataatgtcacaacagaaaataataataaagacagtgaaaagggaaacaccaaatcaatttcaggatgaaaaactacctaaaaaaagaaaaaaagtttcaatggcatgtatttactgtcgtagatcacatatgaattgtgatgaatcgagaccttgtaaaagatgtattaaaagaaatattggtcatttatgtcatgatactacaaagcaaaaaccttcatcaccattaggctgatgcacctatcaattctaatacatcaacaagtgttttaaatacagttttatctcctcaaacgattaagactccaaaccctatagaccttatccatgacaataattttaataataatattggaaacaaaaataataatgtattacaatcatctgtaacaataaaccaattaccgtttttttactcagaacatgcaggttcagaatttaattctttaactgaattcttatcaatgatcgatgataatgatatgatggattccataaacctttccaatgacccattgttacaaaaacttgaagctacaaattatatcagctcaagtaataatttagctgcaatgaacaatgctccgttacctaatgcagatcaaaacttatccaaaatgagtcatcaacaattaaatgtattacagcttcaactgaatcaacaacaaaaagctttacaacagcattatcaacaaaatggaattgttgatccacaacaccgaatagagtctaatcaattaatgaataacgatacacatatacatgataatacacaatctttcacaaaccaattatccaattctttattagaaccatctaatcaagtaattacctcctataaaacaccaaatcaacagaatgctcaactgagttaccaaaaatcaccagctttgacacgaaataacccaaatgtatcatcaatgccacatatctcagatgctgcaagggataaattctttttaacagctgctgatcctacaactgagatttcaccggaagaaagattaaaacaagttattaatgcaaaacttgaggcaggtttattacaaccttataattatgcaaaaggttatcaacgtttacaaacatatatggacaattatatgtcatcatcatcaagaagtagaattttaaaaccattatctacttttagaccaggatttcgtgcaattgctaaaactttaaaagacattgatttaattttagttgaagaaagttttgaaagaatgctattggattatgatagagtttttacatcgatggcaattcctgcatgtttgtggagacgtacaggtgaaatttatagaggtaacaaagaatttgcatctctagttaatgtatctattgaagatctaaaaaatggtaagttaacaatttatgaattaatgaccgaagaaagtagtgttaacttctgggaaaaatatggggctattgcatttgataaaactcaaaaagcagttttaacaagttgtaatctacgtacaaaagatggaagaaagaagaaaaattgttgttttagttttacaattagaagggatagatacaatattccaagttgtattgttggtaattttattccgaattagataatttctttaatttgatctttctttatgtattattaatattattatttaatgaatctattcgtctattattctttggaatttatttcttcaattagatcaaaaatctgacatttatcattatctttgaaaaatctcttagtcaacccataagtaacatcactgacattaatgaatttaaacttttcagtttcctttatggtattctcattacttgtgattatgctttcaagacatttagtaaattcaacaggtgaacttgttccattaataaagttatcaacaactctctgcgcattcttagcaacaataagtccattataattacaaatgattggtacactcaatgtatctgattttaatttgaaatatccacgcaattcatcttttatatcattaaaaattggattatgtgctggtatttctgtttgtaaccatttctttctaattttacttctccatacttttgcattcgtcaatcttttttgaattatatcaagtttattaagtttttccattaattctcccttttctccactaacaactatttgttcatatccatttatattagcaatatttaatttacaatcctctttacagacttttaaaatactcaaaaaatctctttctctaaacattaaagcaaccataccccacttcttatctcgattttcaggtgattgtagtactttctccattaacaatccacgattgtatgcaatgtttaatccgtcctctaatgaaataacatcttgaacaacaagagcggataattcaccaagtgagtgtcctagcaagtaattagcatttcttatatcccaaccggttgtgtttttgtatattgtgtagtttaaataagttgcaagtaaaactaacggttgaacaaaagaagtatttgatagttcttgactttgaatttcttttgaaggaaatgatgatctgctaaaatatttagcaattggtacatttggcactatatgttgtgcatgattaatcaaatcagtataatgtctacttcttacatcgtcaacttgatgatgagttaaactgaaaatttcaggtgtaacatttccctgcccaggaaataatgcagtcgtaatattcaatcgacttgaggttgtatgtaaaaatctacgctgtagcattattgtcgtcgaatcttaaatattatataatggatatatcttttctataaaaaggttactcaaaggtctgatccaaagtcttgttccccagtcaatgttagggatgtagacgtttttttggtctcacagaggagagtctcaaaccaccgccacgtgactcggcggctcgtcatctattccaacttaacagttaacatcaacatgcatttgcttgtagacaacaatttctttacccttaacctcagataactgagcccaaataatcacagcggtgagttgtttgccatatacacatccagaatccaacccgttggaaaattctttagttacaactcctcgtttagcatcatgtccgtaaaagattttagtacctaatgtaaggtcagtatcttttagtgaatctacatccttttcatagatttcaagttgcttctcattccaaattttagtccatgcaactgatttaacaccaccaactttatcttttctatcatctgttggaatttcccaattaggaggtaataaatttctcattgtagttacctcttcgatatcttgatgatgtatacctttactccaaacaagaccggcatgaactgcaattccatctgcttgatatttagcgtgtttgttttgtttaccattagtgtaatgtggaacgggtcctaattttttaattggagaacatttacttagaaagttaatatgttctggagttatttttttagcaagtttcattaactcatctaaatcataagcttctttcattcttaatgtagaattgacattagtttcatgatttataaaagttggaggtttcaccccgtggaattgagaatatcttttcatcatagctaattcatggttacctaaaatacaatcaagattatgttcaattgcataattaataacctctatagaatcaggtcccttgtttgtaaaatcgcctaatagaataacatgatcatccttaccattatcatattcaactcttgttaataatttttttaattgcttcaaagatccatgaacatcacctattaatatcattcttttagcacgtcttttagaatctaagttaccaccatgtttctcttcatattgtgataatttgttaagatgtttctttacagtggaagaaagagatgttgatgcatattcaagtgatttgaagtttggtattatctcgactggatcatcaggatctggttgtttacctttgactttttctggtattattggatgtaagtaagtgtttgaacttttaaccatttttatatcaggaatttgaacaccttctggagctaaattcggtaaaatgattatcataatgtaaacgaaaacacataatgtaattacaataataagttttaccagtttgctatctcttatgtaagctgggattaaactatcactctgtgtgtctagatatatgtactcttcatcatttgcagacattgttgatttgttggaaagagtgagaagatatattggcactgtgaaaatttaagaataataaatttatcaaaaagaagtaaattataataattttcaatgatttctctaatttgattcttttatttgataataaaaatctcgataaaaataaaccctaatggtcgataatgaacccaattacactaagaaatgaatctacgttgtcttaataaattttcaacttgttcagattatagattacttaccacgtggtaatgtgcgatattaaagtaagttaaacagttattgataacttcgatactaggtatacaatgttgcttcttagattaagtatattactgtgttgtaattataaatattgtatttacatgggagtatattatttgatatttgatatgcaatctctctttatttcttagattctgcaatttcttcatctgtggaaaaaatatcactctttccactaagaatatcatcaagagatgatgttatttgttttgtttcttcatcttctggtaatgcctttaatgccttttcagcttcatcaccacctaaaaattttttcatacggaaagtaaattctcttaatgatgaaatatcgtaataccaaaatgcacctgcaccaaccatgccaaaagttgaagttgcaagtagtgtagcatgcgttacagcagccatagcatctctatagaagttgaactttggtggtacatgattatgttgataaaatgttgggttataacgacgtgaaataactcctctatatgcaatttttgatgcaatgtatgttaaaagagtgaaaccgtaaaatgttgccatttgataaaatctacgttcattatacttaagaactgcatcattcttagttgatgcatcacctctccctaatagcttaccaaagtcaaaactcattttgctgaatgtatgctttcctttgtgttgtgacatgaaatgaatgcactgaccatgggtcctttaacttacagtggtgaaatttgtgcaccaaaaattattacgtaagaaagtatggatgattgagagtaactggttttgtgatgcttgaacgattagcattatattctacattataaatcatagtaactatgaaatctaatcgttaaatgactaatatcaaaagtaaattcaataaacaattttaaaaagaccataatgtaagaatcattaccataaaaaattaccatttcctgaattaaacgtctcttaactagtgatcaaatcttcactggtataaatcatttaccatcccaagtttcaagttcaatcccattatccttatatttttccattatttctgtagtatcagaattgacaggttttgataaatctgtgtatactacagttttgaaaccacattgtttcgaatcaacactggaatggaagacacaaaaatcaagtgcaagaccaacaactattactttagaaatattgtgttctcttaagaaactttcacattcagtatcacctttatcccatatatctcggaaacaagaataactctcctttcctgtttccgtccctttatggaccatcaacgtaggtgttccattctcttttgcatctgtgattgcatcttctaaatcttttggatatttggcaccttctgaattttgaatacaatgtactggccataaggtttgtgttttaatttcatctgtcccatagggagatttaacatcaatcgtagtgtataaatcatctttactttgagcaaatgagatatgattttgaggatgccaatcttttgtagcaataattgcatcccatttccttgatttaagtaaattgattatagggtttatgaggtctctgccacccgcaactgctaatgaaccatcaggtggcaagaagtcctcttgcatatcaattatcaacaaagctgtagccatgattgtttacttaacttgatttatgtaaaagaaaatcatatcgactattagagtgaattgcttatttttcgttataataaattttaatgtttagaatgcattattaagtgaacaaacggagagtttatttttcctccctcaatatatgctaatttatagtcaacaacactgctgtatcattataatagttacttccatacactcaaccccatttcttcctcataacactaccaatgatatacaatgcccttacacaccctggccatagtaacgacatgaattcttcacaaagctgagcctccacactattataatttccattaattacccaattgggaaatgattgactttttaacatggctattataagtcagagttagggatgagccgccatcaacaggggctccttttcattagcattacacatcacatttcatgtagattgacaagggaaacattgtggttctttttcttaaatttgtattaacagtgaagggaatttagacatgcccgtttcagtgtctttagatgatatacttgtcaaattttccaggcatgatggtagtaaagatgatgaaaattcaacggattcattctggactgggttacaggaacaattgaaaggtttggtcgatacatatgatgaaaatatgcatgagaaagtgaaagaacttctttctagagatgacaaggatactaagtatgtcaataacgatgctaaagatgatgatgaagatcatgaatctatcagagatgataataaacttgaactcattacagttctttcaattataaaaactgttcaaatgattaacgcttttttgggtgatttaccattaactacagatatttcacgtaaaattaacattttacttttgtcactggtttcaatgtttaaagtaccattttcaactcccagtgacacataataattatgcatttaaaaattttggtaagttactaacctcagaatctacaaacattgtaactccattcattaaatttatgaatgaatcaatgtctactaatatggaacacaataaatcagaaactttagaaaaatcgtttacattattacttgttttacactcttataataaagatttatttgcatttctatttgactctttgaataattcgaatatggcaaatgatattttttattcatttgatttaaaatctaaaacttcaatggcaccattgtctgcttcatcatctgctttttcatcttcatttacatctctttcaaacacattatgcactgacattccatcaatttcatcagtcatgtacagattcaaaatgctgattttattagaggaatctacattagtttctgacactaagtcaactaacttgataaacattttgttcttttcatcttatcataaattattattaattgatttaatttcaaattttattaaactgaatgaacttttcaaaaatggtattacttttaataatcttttcgattatacaactaacattatttcaaattcaaaatcaatcgattatctttcaatatatttatgtcataatgtagaagcttttgataaattggatgattttgctaaatcagaaaatccatctcattcaaatataagagacgtttcaatgtttttgcttttaaaagtttcatctaatattttaatgaattataatattcttcctacaccagagaatcaattattatcctttatagatgaatacaacaatcagaattatttatcaattttaggtatttcagaatcaaataatgtgtctgaattgaatttagcaactttgattccaatatttgagttttatgaccaaaatttcaaattagattatttcaaagagagggatttcttggcaactttgaagcttgcattaatcaacttagatttgaatatggattctgatgatgattttatgaatttgaatagtttattaattgatattggatgttctatttccttacatgcgttggttgataaaatacaaactttacttgttataattattaataaaatcaaattcaattcagaaattgacgtttttaacaaaattccttctgattatgaagataatttaggttttaattctattcccccagtttacagatctgatatgtcatttgaaaataatattgtattacagtcagattcctttggagaattctacaatatattaatggaaatcgaaaatcattcgtcaattattagttcagaatcagtcaatttattggaatcatcattggttttgctactatcaattaaatcaaaggtttataaatttatgaaaaatctcaatattgaaacaaatgtcttaagattacaagatctttttacaaccaatgtggaatccaacaataggtgaagaatattctttaaactcctttaaacaaggtattgctaccaaaataagtagtttcaaatctgcaaaatctttaaattataaacttcttaatgcatctattattctaaacatcaattctaatttaagtcttttgatattaagtgaaaactacaaatatttgaaatcaaattctttatatattgataattcattatctagattgctaagtgaatttacatttgatttctcactaacatttctagtcatttatcaagaatttggcctactaaattttttcaagtccataagaactatgaactatcaaaatttaaagatgattttaccaacttcaatattaattttcaaactatttcaaacaaaaaccgtggattcaccaacattatcatcatcttcgtcatcatcaccaatagctacaccatctaataataaaagttcaactcaatctcaagctatgcaaacaactcaaggatttgctattcactcaagtaatttagacttaattactgagattctttgtaagagtgttattgcaagtaacttgcttagacaatatgttgaactgtttgatgatggtcagtcaaaaccatttaaaattttacataaatttttaaaatcacatcccatctactttaaaaccatctaaaatatccaagggaacctgttgttttagatgttgattattacacagaggcacttttattatgacaatgatttttcataacctatttttcattaagtatttcctttttttataataataatttcaatagtaaaacaaaaacgtaatagaagtgtgaaactttgcatgcaatccacaactttcccacaagttttcatacagttatattcgacaaaactaaaattaggaattagaaattatataaaaagaattaaatatgggaattatgcaaaccatttagaaatgattgccttggtttcattactataaccactaatcatagccatactttgttcttgtggtaaagaagctaataaagtcttaacagcatttgaagcatttaatgcagtttcatcagagatagaagcaaaaattaatgcttgaatgacactatcaacaacaacggatatcttggcattaataacaggatgttgttgatgaattaatttagtcaaaaatgtataagcagattccgcagcttcaacattttgacaaactggtaataaacttatccatgtatttattaattcattaagattattaatttgattaccataacattgaattaaaatagcaattctagagcacatatactcagttgcatctatattatctggtgctctcgcatccggtatagttgacatttgtgttattgatggaatacacgctaaacagaatgatgcatattctgctgcacttggtgactgtgcacataatccaacacacttagcagcagcttcacgaaccttagagtcagacgatgttaaggattctccaactgcattgaagaataagtcgtgaagtttgaatgattcagtttcaccatgtttaactaagtcacaaatggcagtaataccaactcttcgtaatattggattttcttctttgaggaatttatctattataggagctaatttcataaaggcaggaatgaatcttggaccacaattttggaaaatagatgaaatacctttacttacttcttctaataaatcatcatcagaacaatcatcatcataatcggagacttcttcattataatcatcatcaccatcttcatgtgctgaaattctatcataaatttcagataaatttgtgttaattgcatctgcaatattagataattgggtatcatctaatgattgtggtcccataagttctaaacctttagatactgcataataatatgcgaaatataattcaattgcaggatctgtgtttaattgtgtagctaatttattaaacatactcttccacagtgcaaatacttcgttactttgtgaggaaccagtagaatcaatatatgattttaataatgatggcattgtaactgcacaagtacctctgacaccatcatgtaagtagaaatctagacctggaataacgatctcattagcaatttctggaatataaggagcaaacgaatcatctaaaacatcagagtataacttcaatatttcaattgctgcagctttatcatctaaaacagatgtgtgaacagcaatatgtttaccagatagttgaatgacttcgtaatcttcattttgattaatttcatctaattgatcttcatcaacaatagatatatcttgagttgccttagcttgttcaagtaatggaggtaaaacaccaggaagaaatggtaagaatgctttaccaattaatttacaaactctactccaacctttttcaagatatgatttgactgtatcatcatcaccctgtaaattattttgtaaatatgtgaaaatttccaaaacttcattagcagattcactgaacttttccttaccaaccgcagttgcaattaaagtagcacattcaatggatttagcaattagtggtctatttgttttatcaatatcagatttcataacagataataataatggcattaaagtatcataatacttaataaatttattttcagcagcatcagcaacaacagcaattgttgttataacttgttcttgaacatatctctttggagatgatttgagtaagtttaataaattgtttaataaatcatcaaggtatggttcaacaatatcctttgttgcctcttcacaaaaattaactaaagcagcagctgcatgtgtttgaacacgtggaacattattaacagataacattgaaataagtgcaggtaaaattctatttcctgaagttctttgaatgagacttgcaaaatcagttgacatttgacctaatgcattacaacaagcgaattgaactcttggttgactgtcgtttaatgaaggaataatcatatctaataattttgaaatttcagaacttaaaacatcagcacaaccttcacttgcggatgataatgccatcaatgcagcttgtctttcatgccaatcttgtgattgtaacatatgaggtaagtattcaaataatggacctgctaaacattgaccatttaattttaatgcagctctatcaagtgcttgtcttgcagcattatattcttcttcatcaccttcatcatttggatcatcaatattattccattcagaacaatcatcatcatcaatacaaacttcggtcattaatttaagtgtaactataactatagttgaagaatatgatggttctcttttacacatatttggagatgattcacaaaaagttgttaataattctaaagcagttaatcttgcatttgactctaaatctttattttgagcaacttgtgaacaaaagctaataattgtttcaaacattggtttgaaaatttttggagctaaaaccgctaaatcaatcaaactctctaaaacggatgctaatgcagtatcattaccatttgataataatttaggtaacaagttcaataaatttggtaataattgtgatagtacggaccaagttgattttggtaagttttcaaagaaggcaataaatgcggtacaagttgcaattccaacatcatcggaaggatcttcaaaaccagaatggaacattttcaagaaagattcattaagatcatgatcactaataatttgtggagttgttgcaattattctgaatgatgattccttaattgcagtatctgaacttgaagtagcttgcagaatagttggtaataaatcaggccattcaaatttatcttttgcaacttcagcaattgcatctgctattttatgcctaacatttctagtttgttgatttgtaaaaccttgtaatagaatcctacgaatttcagtttttgcagcaggtgaaatttgatcaatttgtctatcagtaagtgaaaattcttgataattaggagatttaattgcaaaacgtctaaacaagacagctgcaaaagctcttgtattttcagcattaccatttgatgcttgttcagcaaggaaaactaataaaatatcaatcttttcctttgcacaccaatcattacttaaagctgattctgcttccttacgataagtattatcatttgaggaaagagcagaaagcaaatttcccaatatttcttgtatgtcttgaggtatattagacattgtctgtataacaattgcttctagtaaacttcagtaactatacaaaaaagttcaaaacctaacttcaaattaaaacacccttttattacgtgaaatttttaaatttaaattgaaagtactcgtcattaaaacatgtcgtcctttgaaaaaaaatcaatgatttattacctaaagacaaggtgcactgattaaatttttttcaaaattttttttttttggcacaaaaatattttttttttcttcacttgaaggtttatactactgatagtgaaatttcaagatcattttagtagaagaaacaccggagatttattgttttattaatatacaattgcaaaataaaacacatatattgaatataatatgggacttgctggaacgagaacaaaacaaagatttggattggatcctagaaataccaattggtcaaataataccgaaagattcggacatcaacatttagtgaaattaggatggaatccaggtagtggattaggtttatctaataattcaataacatcacatataaagattacagttaaaaatgataatcttggtttaggagctaatttagctaaaaggaaaaataaaactgatgaattcgatagtggagaaaatgttcatttggatgcatttcaacgtttattgggtaaattaaacggtaaagaagaagaaattaataaagaagttgatagaaagagaactgaaagaattataaacggtcgttggggtgttcattttgtgaagggaagtacattatcaagtacttgggataaagcaaataaacaattgaaaactactgatgttagtgataagaagagacagagagatgatggaaacgatgatgaatctgaaataaaacctgaatctaaaaaatctaaaaaatctaaaaaggataaaaaggaaaagaaagaaaagaaagagaaaaaagagaaaaaagaaaagaaggaaaagaaggaaaagaaggaaaagaaagagaagaaggaaaagaaagataaaaaggaaaagaaatcaaagatagagaagaaagagaaaaagtccaaaaaagataaaaaggataaaaaatctaaacttgatgttaccagagaatcaatgctgaaaccaaaggaagaattatcaacagcaaatgttactggaagtaagatggcactgcgtggtaaatggattagacaaaaacgagctgctgtcatggatgaaaaagctttacaagagattttcatgattaaatagttattctgctttgtataatatataatagttaaattttatagaggtttctattttttagattaatcagtttacttggaattcaaaagaatatgttcttttaagaaagaaatgaatatacaaaaacttaaacaaaaagaaaagaaaatggtggatatatagtttgtttatttattaacatattgatggaaatgaaagtttagaaaatgaaacgatagtatatatgattgataattttttaaaactattttagtatttatcacaaagattataataaaatcattgaaatagtacctacagcgactgaaccaaccaatgtaaataagtagagggaagaaacaccaatggaatgtaatggagattcaattctggaagcagcaccccttgatgtggaactaatacttgaaactgaagatgcttgtgacgaagaactatcagctgtccttgaagaatcagaactgtttttagtactagtcccagaagaaccttgggagaaagtttgacttgcagaagcagccttaagaacagaagtacaacttgattcagcagatgccttaacgattgtagcagaaccatcaaaatcacaagctgatgtattttcattttgatcttcgtaatatttgtttaaaacataagctaacttttcctttggagaacagaatgagaagacaccatatttaccagatttaccatcagcattaatttcatcacatgaagtgtaatcacaaacaataccaaataattctccgtaatctttttcatcaacatcatctgagattgtacattgaacagatttagcaatacactgacaaacattatcttgaggagttggaggtaaaccggtagctgctttccaatcagagttagttgcaggacatttcagttcatgagcacttgcagaagcagctgaagctgtagcagatgttggactaatggaagccatttcagatcttaagtagttgaaatcagctaatgtggaaacttcattatcatcaagagaaactaatccataattgttttcttcttcaaaatacatgtaaacaataccaccagaccaaacatctgtcatttcatcagaaaagatagctccgacttcagtaaatcttctgggttgaacttcattacaaccatattcagagaaaaagactgggacagttaagttggcaaattcggcagttctatctgcataaccagaacttctaaatgtagattgaccacaccattcgtacatattaataccgtagaaatcagccttgatatcattatcaccacaagaaaagtaatctgctgatggaactctagtatcagcatcatcattagcagaataaccaactgggatatctctataacctttttcagaaatataagatttcatatctctaattgcagctttgacgaaaggagcagaaacagtgtttgaactatttgtaatgacttcgttacctgcgaagaaacctaaaacattatcatattgttgcatcatatcaataacatcagtatatctttcatataattcaacagtccattctggatcatcagtaataattgattcctttggagatgataaatcagcaataacatagataccagcatcttgtaaagcactcatacaagcatcatgatcagctgaagcatttaatgcataaattctaagaacattagtatttaattgagttaaatatggaatatctcttttacaagaatcttcatcagccaatggatcaatataagtagcatctgaagttaaatttgcagtattttgttgatatgcaacaccacgtatataaaattgagaaccattatttgtatagaaaaatttattaccaacaacttcaatagttgggaaatcagcagcaactgcacttgaagcaaaaagtaatgcagataatttaacgagtgtacttgcgaacttcataatataatgtggttatttgaagtttgaatgtgaattacagaacttagataaatcaaaaaaaagaatgaaagaaagaaagatgttaatttagacaaatagcagattgggaatcaatgtaatgatataaataattacaactaattttgcaccatgaaatagatggatgttgctccaaagccaacacgccttatacactgcaaaagggtaaaggtaaacagaaacaaggctttgcaccagctgtgccagcagaaagtctggaacagaacaagcgtgtagattagaaagtttccaaaaataaattatttttcactctaaatattatgtcatgtcaacggcatcgcgtggggtaaactaattattatgataataataataataattaataacactcaggttacgatggttcgtgttattataataatatcatcatgtgttgtggttccagaattccagaggggctgagtaaagtttaattgatatattgtaaatattgtaaaaattgtaaaaattgtaaactgtgttaaatatatagggtgttctatatactcgaaatacataagaaaagaatgttagttatactataatgatataaaataaagatagaaaaaacaaaagataaaaaaatgaacttgattgatcttgaacattgatcattttgtatatgaacaacatcaactatttaaattctatttgatgttagacatacatccatttgatgataatggtgaaaataacattctagttttcgattttaattggaaagaagtaaaacaaagaaaataaataaataaatgattgaataattgatggataaattgaattgaagtaaagtgaagtgaaatataattgttcaacttataaatattgaagattgttaattgatttgtttgtgagagaaaaaattataatacaaaacaaatataataaaaatcaattgattttttattggtacaaagattttgataaattatttattacaatcatcaaaattataataataatgcagcaataacaccaaagaaactcatgacagatgatgcaccaacaacacctgcttcacccctactggttgatgagattgatgaaacagattgagatgcctcccttgatgaagaagtttcctttgctttagttgtggttttagattcatcagtggtcttgttagttttatcgcttgatgaaatagtcttggtttgtgtaacaccagctgcagaacctaaacctgatggacctgctgctgataaaacagatctacatgaagatgcagtacttgcatcaacaatagttgcagaaccatcgaagtcacaagcacttttgttttcattttgttcaaggtaatataagttaagaacaaatgataatttatcctttggtgaacagaaagaatatgcaccatatgtaccctttgaaccatcaccattaataccatcacaatcaattgtaccacaaatgtaactgaataaatcttcataatcatcttcatcaatatcatcagagataacacaagataatgatttttccatacattcacaagtaccctcgtttggagttggtggtaacgcagtttgtgccttccagtatttgttagtagttggacatgctagaactgaacccgaagttgaaatatcagaaacttttgcagtagttggggagacattgttaatttcagatgaatagtacttataatcagccatggtagaaacagtatcattatcaacaacagagactaaaccataatcattaacttcttggtaatacatataaacgataccaccagaccaaacatctgtcatttcatcagagaaaatagtaccaatttcagtaaattgtcttggttgaacttcattacaaccatattcagagaaaaagactgggacagttaaattggcaaattcggcagttctgtcttcataaccagatttcttgaaagttgattgaccacaccattcgtacatattaataccgtagaaatcagccttgatatcattatcaccacaagaaaagtaatctgctgatggaactctagtatcagcatcgtcattagcagagtaaccaactgggatatctctataacctttttcagaaatgtaagatttcatatctctaattgcagctttaacgtaaggagcagaatcagtattagtattattagtaataacttcattaccagcaaagaaacctaaaacattatcatatttttgcatcatatcgataacactagtatatctatcatataattctaatgaccaagatggatcagtagttgaaatagctacagttggttcagctaaatctgcaataatgtaaatacctgcatcttgaaataatgacatacaagcatcatgatcagcttctgcatctaatgcataaactcttaaaacattagtattcaaatcagttaagtaaggcaaatctcttttacaagtttcttcatcagctaatggatcaacaaaggtagtgttatcactagtaccgacatctttttgatatgcaatacctctgatgtaaaattgtgattggttattagagtagaaaaatttgttaccgacaacttcaatagttgggaaatcgtcagctgctgtaattttagttaaagcacttaatacagaaactgcaactgcagaaaatttattgaataacattcttgaactttaactgttgattaaagaattaagaaagtttcaaaagaatgggaaatatatataaaaatatattacaagtcagaataaaaaagtataataaaacgaaattggagtaactaagaagttattaaagtaaaatgaaatgccaaaatacagcaactttgtaaaactttcaggaaaatacttccacttttcatttattgtaatcatcaccacctcgataaaaagaaatgattgctgtttcaccgtggaccgtcgcgctgttgaccgtgcgggtattgatcttttgcctaaataggaaatggtcgctaatggaaaaaaccgtttcccagcggctgaaccgtgtttcacattcatttagtgggccagtcgtgagggccaaaaagtgaaacaaaaacaaaaacaaaaacaaatagcctctcgtttcttttgtgcgggttccaaaattttactttattgcttttttccggagatcacggagataaaatacttttgattacgtaaagtatcagattattacacgttatcttaacttaactttaaccttaatttgaaatacaaaatacaaaatattaaaataaaatcttaatacacatctacatccagtaggttgaatatgtcttatgtgctggtttatcacgttgaatactatcaggagcacgtggaccagtatcattgttatcttgatgatttggttgaatcaatccaaatgattcatctggtaacatcgatttaacattatcttcaaatcctaatgtaacaactattggagcaattaatattatagcaaagaatacaatgacacaaaaatatagtaatgcatatctactagcttctcgttttctccttttctcagttgatgtagtataaacaggttgccttaatttactcattggactaatccacataatcatacatgaatgccaatgatcaatatatggaataaataatattggtgtaagtaaaatcaatataccatgaccaatgaaaaaatctgcactaaataaactcatctcactaatcttaacaataaactctcttaatggttgtgtaagtgcatatctacctaataaaacccattttcctgaccaccatgctctattacttaagtcttccttcatttctctacttaacattaacaattttgatgcttggaataaagttctttgtaaaaatattgatgaaacaagtaaaatcaatgttctactaaaattaaatccttctaaaacccaaactaactcaaattgaataacatgaattataacacctgctaaatgtgcaatagcagctaacactgatggaatcttagtacagcaaagtgataaaacaggacctgcaaataatgataatggaaatatgagtactaacactattgtattcataagaattggaaaagcagtaacaataattaacctaacaattaaattaacatcatgtggactagatacaccagactgtgaattcatgaacatataagcaataatgataaaaaatgtttgtattgatggagcaaatatttccgcaaagaggacatttataaatggagcttttctgttatcttccttaattttctcattttcatgatcttttaactgatgtctcttaaacccggtaaatttagatcttgtaacccttgtatatgtgatccaagaattcaaatgccatttggaattaccacgacttaaccatctaacaaattctctgtaatcaataaagaaatcagtccatgaaaattgatgtggattgaacaaaaatggtgataacgttaatgaaaccattgtgatccaaaaccataaaatagaaggttgccacattgtaatagttgcaaataataataataaaaataaccttgaaccaaagtaaatggatgttggagcatatgcagagaataacttagtaaacgaaacccgagtaattgaaaatccacgaccagttgaaatgtatctggcacccccaaaaataatatccttctttaatgaatctgtatatatttgacaaacaaaaacttcaaaaattggtgataatgacataaaatgcataaataatctacttgccgctttccataaacctctttctgataattcgtgtaaaactaatggaacaaatgaaataaaaaaacaaataaaaatggataagacatatctgtaaacccaatctaaaacaggttgtaaattttgacatccaaggggaacttgtagatcagtaattggaagatctttatcataaaaacatgggattaattcgtaatttaaagcacctaaattaacaactgttaacataaaaatttctaatgaaaacataataaaaagattgttgatatggaaacctggatgagcataataaaaggataaaaatctatccaaagccatttgagtaccaatataataatactctctagataaaagttgttcacccataccacctccaattttagttgtgaagttcaagattgaaccaaaacctaaatccctacctttaccacattgaaaataatcacaatgcttaattcttccacctctgcaaatggcattcattcctgcataaatatcttcatttaaatgaagacccttttgtgcctttgatataccacctctagtacacataaaaatagaattcaaaaaatcaggatgaccataatgtaatttacctccaatttcagataaagttctagcaaacatagtaccaaaagtttgttcctttgaagctgcaacatcacctaacacaccagagttttcagagaaaatatattctctagctccaacaatagcaacagggcttacatttttatagtgtacagatggaatgtatggattctcattatcttcttccaaattttcaaattctgataaaactgatctgattttaaaacattcttctaaataattatcttgattggcatcaatgacttgaatgacctcacctctataataaataatggataagttttgattatctgacttaccgtcaccaaggattgggtttcctgatagcaaaattttatatttctgtttcaattcattgccttttctcattggatcattttcatctggcttcttttcaacagtatacaaaacagagtaatattttacttcattagtctccgcatcaacctctttttgtaaagaagcaattaaaatagatggatatgtattaactaaagctttcacatttgccaattcattttcattaaacgcttgaagtctttgcattgaaactagcattctaaatttcctgttagctaaaatttctaaataatcttcaaatggtttgttactatcaaaatacgattccatttccggattttcaattttatgtaacaattttatagcttttgtataattcataaacccagaaatagttctgtataacgtttgtgtttttaatgatgcccaaattcgtgttctcataatgtattctggagcagatgatttgtatccaatacaataaagaggtaaatcattaattttgttatcaacaaattccttttctgatttcatgaaaactgatgatgattctggtttatcttcatcagtagtatttcttttagataaagctaaaactttagtatcagcaacaaaatttttccattcactttcatgcattactttcaaatattctaataaagacatttttgaacttggatcttgtctaataatttccttcaattccattaaaatcttttcggcatagtggggaataaaaacagtaaattggggcattgcttcaactggaattggctcaggaacagaagtactcaaactttgagcaaaaaatattattcttctttcagcttcagaatttggaaaaaaataatctgtaatatctttaccactatcatcttgataaagaaaaaatgatggagcccttaaagccataccaccatttgtttcatctggaactaaggaataaatcattttttgtgcttggtcggcagatatcatatgctcacgaaaaagagatataatgaaagcattccaaacttgtgagatcaaataaacaggttcatatttaacctccatttttgatgtagctaaaagtttagaataaatacgtgatggcaaccttgtgaaaacatttctccatggtgataacatcgaaataccacttgaaaacgacaatgataatgaaataacacaattccagataatataccaaagataagtgtctaaaaagaacaaaatcaaatctgtcaaaaacatcaagcccaaaacaaaattgttttgatatctgcataagtattctttaatataatgatcgccgtggcatcttgataaatcaataatatttaaatttctaatcggatccctcaatgaaagagttaagaaaaagtaagattcagtaaatttagcaccgaaaaccaaaatccataataaaattgaaataactctactatattttcctaaacttggaaatgatgcagtaaaaactttaatcggatcatacacttttttattggaaaatgaaaaatcaaacatttgaaatggagcttgaaatgataaccaaattgttgttaaaattgaaataataaattggataatggaaacaatcaaacctgcacgtgaaatgacatcaaatggaatataacctaaaacaaaagtagaaggagcaaaattcactatggtgataagaatcaataaaaataatcttttccaaaggtttggtcttcctggccatttatttggaacataagaaaactcaaaaatagttgcaataatctcaacaagacatccaacagtactacctaagaaacaatagaaaatctagattgtaaagttggttgattattcaaaagataattgtaatctttagtatacaatgtgggtgaattgaaacttgaataataccagaaaacatttaaatgaataatccaaattctactaaagttagtagccatatgccaccaagaacgtttctctctataagttttttgaaaagaagaagaccacacaatatcaccgattctagagtacctttgttcctttgataaattcataaacttttctttaccattttttgtaagtttcaaatttttcaagcctttgtaataccaaaacaattggttcatgtcatcataacctataatttgatgatgatctttttcacgtctaatatattcaccattgtaaagtttatattgaccatcacgataaaattcatataaaggagtaataacacggttcaaatagtcatattctggaaaacattcggttgaaccaatttcttttctatcaatcatataatccaatgcacatttgaaaacaaaacataataattctggaacaaatcttaagttattggcttcaccccatatcattaaataaagagcaagttggtaaaccatgtcttgaggagtaagatcgtacattcttcttctccagttatattcaacaagttgaacttttgaagttgcataaaaatcaaaatccaaactttgtttctttcttttctcttttttatatttcaaaagatcaattccatccatcattcctggatcttcatctatcatggcacagaagtaccatttcctataattagaatgttcacctccaatataatctgcgtgaagagagatcaatgcctttccagcagaaacacgactagcttttgaatctagttgagacatgaataattcaaaaacgttttcacagttatctctctgaaatccaaatataccacgaacttcatcaaatattgtatagatatctttagaagtgattggttgttcatcatcagtattatatgaaaaatacaaatcagcatctaactttttctctgcttcttctctcaattgacgagccgactttttagcaatatgatgcaccgaaggtggttgacttgaagcattctctaatggcatggatctatttatactttctaaaggttgggcttgttgttgagtatttgagcttttttgaacagattgatttggctgttgattggttaccatatcatcgttgcttcctgttttatcattgttattagcctgatttggatcttgtacaaaatcatcatacatgaagtaatcctccatgttgactggccctatgatatttgaaagtagaaagtatgtatattaggagtaaagagccgtttaaaggcaaattagttttacaatcttgtgaataaagttggttttgcaaagttgccccgttcaattggtttgattagacaacattttcctatttttaccttgacctcgtatttatttcaagttattgttactattcaatccatcttatttcataacaaaatgatgcatttaacatggacatgtggatgcctgtgtatactttatattttagaaaggtagttaatcattctctagtattcaatgttgatgctaatgaattcaacaactccaattgtgaaattcatcatgtgattacgtaatctctggaaaaatttattcaaaaaaatttcagtactagtggtgtttcaagaggaatcaaacaggatcgacttggaagagttatattatgagaaagtcataacttttaaacctaataacaaggagagtcacttattgatatttatattataattataattctgtaaggttggaaaatttttaattgaaaagaggaacaatatatgaacaatttctttaataaaataactaggaaaatgtcaactttaacaccattagcacaactcaaacctccaagaaatgttggaatgaccaagcttgataaatcaaaattcaaaattaaccgaaaagtttgggctttgatactaccagaaattaaatacattaatggatttttaaacaggaaaaataatacacaatcaattgcactctcattacctcaacagacttcactagtagaattagataaggaaacattatcacttgatcttctacataaaatttctgcaaaaaatcctaaactcaaagctttgcttcttaaagaagatataaatgttacagatgaagattcaaaacatgaaactgaacctaattacgaaccagaattattaaaatctaacgtttctgatgataatttacaataaattgaaaaatctgggtgcaatctacaaaatgtatgacttgaattttggctttgaatattgggcttatgatgatattctcaaatctgttttaccagatgacctaattgaaaattgtccaagtgctttcacaattgcaggacatttagcacatttaaatttaaaagaacaatacatgccatacagaaaaataattggagaagttatttatgagaaatttcccaaacatcaaaactgtcgttaataaaactaataatataacatctgaattccgaacatttgaaatggaattattagctggtagaagataattttgtggttacccaaaaggaaagtggatgtcaattcacttttgatttccaaaaagtttactggaactctagacttgcaacagaacatgaacgattaattgattcatttagagatggtgagatagtttgtgatgtcatgggtggtgttggaccatttgctgttcctgcaggaaagaaaccatgccttgtgtttgctaatgatcttaatccagaatcatataaatatttaaatataaatatagatcaaaacaaagtggatacatttgtcaaatcattcaatttagatggtagagaatttattaaacaatcacctaaaataataacagaattccaaaaagttacgccagaaatcaaatatgttgctaaaaacataaattcaggcagtaagaagcaaaaagaacaaaagaataacgatgaacaatcctaaaaagaaaagattcatcacatttcactgtaccaaaatttgcttcgcattatgttatgaacttacctgattctgcgattacatttgttgattcttatattggtttatattctaatggatttgatggtttaacaaatggatgaagtcaagagtttacctggatatattttaccgattattaatgttcatcattttgaaaaatataaagatgatgaaattgaaggagatgttgaaaaagaacttgaaagaagaatgcatctaaaaattgttgatcaattaaaatttgatatccctatagaaaacattaaattccatgttgtaagacaagttgcaccatgtaaactgatgtactgtatctcattccgactacctgaagaagttgcatttgcatagtaactgttataaagttatttgataattaatcattaatgcatttctataaagctgtttataaaattagttagaaaagttacactgaaaagtaaaaacatattttacacattatggtctatttcccattgggccctttttctccatcttacagcactccaaaatgatccataactccaagttaaatcttctgcaccttccatatatcctgtatatttattgaattgctcactcatatggccatcagcatcaacatgttcttgaataacttctaaaaatgcatcagcatatttcattaaagataatgtagtatcaacaaaagcatctgatccgaatggtaaaataactttttcagatttagtattagggtccaaactaataaaattagaataaaatgaaaattgatcgttagtgataactaaatccttgttatgataataaagataataaaccagtttgaataacagttcagaagatgtggcagttgcaataaaccatggattaccttcacttattccgagcccgtcgtatagatcttcagggtatctacctatagcaaaccctttattaaaagtaccatcagcatgatttattgggtatctatatttcatatcagttacaagagcagctaaagtacttaaaactgaagaatcatcaacagaaaatggaatatcaattatatcagttggatcatctaaatcatgtgctcttaatgatgctaatatggaagcaatatctaaaccacatcttttagcttcagccactaaagatggtgtttcgattaaaaatggtatatttggaactttaaaaccagaatcaagcagaatgtacagtctcaaagcagtaaaggaagttcttaatctaaggttaaattcataatctttgaaagcttctgaaagtttaatacccatctttaatgattttaacattgtcaaagatgtaaataaatgaatagagtcgatttcttcccataagtcaaatccatccttatcccatttgttaatcacatacgttaaatctggttttaaaatttcattataaacaaatgaggcattatgaattaagtttggatataacacatcaagatcattattttttaaaaaattaagataatttatcattgttataactctaagaccaggcccgtctctttgaggtctaccccaatgttcatcaaaggtagtggtatcaggcataaattttggctcccctaaactatcaagtgattcccaggttccagatttattgtctaatctttgaagtttatgattgttggcaatatatgattcaattgcataaaagagcttctttgaatacgaggattctaaatcttcaatattatcatttaaatactcaacaattgaattaacggtaatagcggcatctctaacccattgataaaaataatttggatttgattttgaaggtgatgcaataactgcaccatcagaaacattttgaagattagtacctacacctccaatattttccaaaattctagaaaatgaaagttcatactgatcgtcaatccatgattcaaaattttcatcagtagtttcattcaagtggtaaatactttgaataccatcatcaatataaatttccgatggttccggtttatgcaagtagcttgaaaaaaatgattcaataaaacttttgaaattattcaatggtaaattcgatgcagcatgatagctttgtaagggattggcctcagctatttgaacaagtggaaacccaacaactgacgttgatgagattaaaagcagtaaagctgctttcattgatttattaagcattatagttgaagcaatataatttaagaaataaaaaaaaaatagataatattattttaaaagcaaaattaattttaaaaagcaactagtttaatatataatgaagtctaactgttttgtgtataagattgatctaactctagccaagctgtctataataaagaaatttaaactctaaagtataaaaaccttaagcaagtgaaaaaagaaacaacttttaaaagggaaacataaaaaataggggaaagtctggggattaatgttatcaaaataaattgataataaaaaccacaattagcatcagttgagcccctttttcacagtctaaaaattatgtccctgcgtcgctagtcgccgtttatttcctctttgggacccgtctccgaagcaccgattattataccggagatatggggtagtacttatataaaagttatcattatttgaacaaggtttctggtaacaagtattgcttccttttattggaaataaatcctaaaaaaaggtaaacaagctcaattatgactcaagaaacaaagaaacttatacaaatactttctaaatatgctacatgcgatatgtcagatgcattagtcaaacaaaagaataaatatggtggttcattaccaaatttaaaacgttattcatcaaataaggagggtaaaacaatggttggtaaggcatatactattctatttgctccaaaggatgatccaagagaggcaattggtggtggttatattgataaattacctgaagattcagtattggttattgcaacaactctcaatttacaaaagaaagatgctccatttactaaaatgactaatgcattatatggtggtttaatgtcaactagagcaaattatttgaaaagttcaggtactgttgttttcggtagagttagagatattgatgaacatttagaattaaatagagatgtattttcattcggtttaggttccgcagctcatggtccagtcgttaaaatggttggtattaatgttccacttaaaatcttaattgatggttatcctgagccctatgttgaggttattaatcctggtgatattattatgggtgatgataatggtgttgttaaggttgctgatgatgaaaaacttgagtcaattctagaatatattccaaaaagagttcaggctgatactctcgtgaaggaagatattcttaatggtgaggaatgtacacctgctcaaaagaagagaagagagggtttataatggtataaacaatagcttattatatttatattaagtaaagaatatatggtatgtagtaaaagtaaactatgtaaagcaacttgctctatggaaaaaatcgaatttgttcaagtaggaagaaaatttaatgctcacaaaacttagtgatgataaaaaaattctttgatttcttaatctctgtgcaagttgcaaaaaaaaagtttagttgtattgatatatttttctttattattagtaacctataacgaacaaaatggtaaaggatactacatactatgaacttttacaaattgaatcaacagcaactgatttagaaattaaaaaatcctacagaaaactggcaattaagtatcatcctgataaaaatcctgataatgaagaggctgcagaaacatttaaaaaaattagtgaagcttatcaagttttgagtgataaagaaaagagattaaaatatgatcaatatggtattgaagaagcaggtgctactggtatggcagatccagagaaattttttgatgaaatatttggtggtgaatcatttataccatatattggggaattgacgttattgaaaaatatgacaaaggaacttgaactttcaaataatgaagccgcagaacaagaagctgcagaacaagctaataaatattatgaagaaaaccatgtaaatatatcatcaaacaattatttaggtgatgcttctctgaatgatttatctcttgaggaacaacaaaaattaattgaaaacgaaaggaaaagacaacatgaattagaaagagaaaagatggaggaagaacaaagccaacatagaaaagaaattcaagccgaattgacaaaacaattaataaatagattgtctgtgtatactgaaacagataaatctgatgatataaagaaatcatttcaagaaaagttcagacttgaagctgaaaatttaaaaatggaatcttttggtttagaacttttacatacaattggtagtgtatattataataaagctagcacatttattaaatcagaaagtacaattcttggagtaggtgggtggtttggtactctcaaagaaaaggggggtattataaaagatacattttcaacaataagtattgcattagatgcacaaaagacaatgcaagatttagcaaaaatgtccgaccgtagagaacgagaactaaataaaaatgctgaaactggagaagaaggggaagacccagctgaggaaaaaggtgaagaacaagcaaaggatgactctcgtcctgaggaagaaagtgataagaaggataaaaaggatcctgaagatgaaggacctgtaccaacagaggaggaaatagctgaaatggaaaaactgttgatgggtaaaatactagctgcggcttggaaaggttcgcatatggaaatatcatcaaatttaagagaagttgtctccaatgttttatatgatgaaagtgtatcattatcaaagagactagagagggcagaagcattgaagttgataggtagtgtatttaaaaatgttgaaagatctaaatgggaagctgaagaagctaaaatttttgaagaattagttgcagaggctacttcaaaaaaggcaaagaagaaataagttataagtgatactacttgtagatattaatgataggattattaaattatatgtacagaaagttttataaataaatagaggtgaaatgtaattattatgatcaaaattaattcttttcgacagaatagtaaacttttcttagatcaacaaccttctttcctctttctaaagccatttcttcagttgtcttttgttttaataatgcttctatagtacatttaacaacattcattttatttcttgatctataaacttttgaagataaatcttttataccagcacattgagctaattcgaaaatcattggattacatcttaaaccagaacctggaggtgcagatcttaaatgaacgacacttgcaccaaatttgtgctctatattaccgaaaattgttctatcttctaatcttggaactttaactaaattctttactgcttgccaatgagcttttaaaattgcagtacctggttcttcagggtctttaccttcaccaatacctaacataccatttccatcaccagcacacacaagaggcatagaaggaattaattttaccctttgaagtttgatttctaacagttttcaaaagtaatgttttaacttttaaacccataatatatctttcatcaaaaccagttgcaagagataatttctttgctaattcacctaattcagaacgtttcttagaaccttcaacatctaaaatttgattttttgggatatcaatttcattaggttgagaaattttagtgaagtcaagtgatcttgttcttgatgatcgaaataatcactttttttagtgaaatctgttaaaaaatgtggagcaaattgaataggatttaattttctgttttcataatgttttgggtcaatagcagtttcagctttaaggatagaatcaactatttcagggtcataataattaagtaaatattgcatatggtttactttctttggatccagactacttacttccttttgaagtattattctggaagatgaaaacatacgcttactcacaagtttgaaacatggtgttgcttatatatgagtagttatgaatatatctgttcaaactaatctaagacttctttcaccctatagctagttcaattcatgcattggacgaaaatttcaactttcactttggaaaaaaatattaagatggcaagctttattcaaagtcgcgactctcggctcagcatgtttaaaaaggttagttagttacttataatggagtacttcagttcatgaataaacttatttattaaacaatttatacttacaagagagttatttataaacagatatatgtatagatttagaatctatttattttatttgcattggagcaatgacaggttgtggaatagatttgactggagattcaccaagtaatgcaggagcaatagcaacatgaaggttatcaacttgtaattgaggatttctgtttaatccattaacgacaacttgtgcattaactttcaattgtggagttttgtatgatttagttggatcaaagattaattcaggtctgatacctttgacaacacttgcaattgttgaatcaacttcttcggctgaaatattttgtaaattctttaaattagctactgatctctttaaattagaaggtaatgtattattagcatatgggtaaagagttgaagtttgtgggagatattcaacatttctctttactgagtctaataatttaaatcctcttctcattgtaatttgttctaatgcttttaagaaacgagattcagtgttgtgagctattttatcctttgataagttcaattcaagtttattaataattgatggtctatatggtttaactgtatttttaaattcagcaaatttatcttctgatgatgcataaaggttggcataatgattaatacgtgcatttatgaattgatgagttattttgttttcaaatgttggaacaacaggtttaacatcatcagatgtctttcttctaatgaaaaatgccttttcttcaagttcttcagcaaatttcatacctttatcatttaaagtttgaacattacgaccaatatcatcctttgattttttatttctgtatctatcaaaatcagagactgtctttctttcaggttgatcttgaattactgaaacctcttgattcttccttttgttctcttgttctataatttgaacctctctttgatggagatttattgaatgaacggttattttgatatgttttcttattatttctaaattctggtttgttagatgatatttttctatccttattttcacctctagaaaatgatttcttatttaatgatggattagcagtttcagttgatgaagctgcctcagtctttgcaactgttgctaattgatctagtaaatttttagttaaatctgaagatccagaagcttcggtggccatacctcttgcatttgcaattgttctcaatccagctcttgcaaacatcgtgatttgaatggttcttgaaagatatttatatctatactgaaccaaacttctagttctcctggaatgcatttatttaattcgacgactggcatgtagaagaacttcaaatgaaatttttcattatatccgggtaaattacattacgtaatatatttccgattatctacgaattaaaatcacgtaatttctttttaatacgtagaaacccgggggttcggagtggtgttaaaaaaaattaatttttcactccgataaaatcatgatgtgtttaaataaagaccgttttccatcatttattaatataaattattgtataaagaacagatgttcctgattcttatctttcttatgaatcatttatacatcgctattttgagcaattatgtccttttttttaaatatacccacggaattacaattacgagtattggaaaatgtatctgttgatactttacaaaatctattaagtaactgacaaagtattttaactctattacattatcttcaattcattcaactgttaacacactaacagcttctgatgataggttttattttagtgtttttctctcctcaagtgaaaactcatctgatacaaacttttaacacaacttgtgtatcaacacctattcaaaattcacaaagtaaataccccattaaaaacagagagtgatgataaaacactacttgttgactttaaaccgtgtttctgaaaaattaaatctaatatcttctaactcttcattatttcaatctatgaattacaattctaattccgttctcaccatataaatcagttttcaaactgggtgatcttcaatatacccgaaatccactgaaatacaattcaactaatgttccagctaatgaggactccacaacatcattatctttagtggttaacgaagatgaaccatacattaatatacagtttgagatgcaaatgaaaaaagatatatcatctgataatttatcatcattatttaaagtccattcaagaatttccccactgaaagagattggtgcctcttcaacaggtgttttatattcagatgataaagctgttatggttgaatattcaattttgaaagaatcagaagtacccccttataatggatacgattatgatgtgttccataattataaaataaattttggtaatatagaaatcaacaacacatacttacttgattgtattgaaggttgatttcctggataaatgtaacgaaccatttttcacgacattttttccaatataatttttgctctttttatttatttacagtacaatttatatttgaaaatatatattcaaaattctaataatataaaatatagttataaataaagtttgtgactgaaaagcattttgtttaagatggagagtaccatttcatggtatactttctagcagctttaccattccagtacattataatataagatccactggagaccacacagaaacaagctaacatgatagtagttcctaaaacaccaacaccatccaaccaatattggaaaacaaaggtgaaaactgtagcaagtaagtttctaacgactaagacggatgtcatggtttgaacagtttcaccaggataacattctaaaacataggtaacagctaatgaggttgttgtacatataccaaaggaaattaaggcaataccgattgctgcaacaatccatggggctccatataatggacctaaaccatacataaataaaccaccaatatttaaaaccaatggaacaatattcattaataaacggaattccggctcaaaaacaccaccgtttttctgagacatgtaaatgacaaacttatcagagaaagcagcatatataccaccaattgtattaccgacagttattgagagatttaatagcccaagtgcatctgctgaaaagttatatggtggtgcttggaaaaattcagattgtgaaacagtaattaaagataaccaacacatttgtaaaccataaacaagtgctgcccaggtaactgcaggatatcttaaaacaattaagtttttgagaatacttaatattgaaattctgttttctgtaataataaatggtttcaataattccatatatgtttttggttttatatcctttgatatctttactctttgattgttatccacatcgctacatgcaatttcatctacattgaaatttagtttttcatttgactctgctttatcactataaagttcaccttcatgatcatgtgacttgtttgataaaacaacttttaataatttctcctcaacgatttcatcagtttcataatgtctaacataaaatgattcttcaagcaagaaaaactctgcaacaaataaaccaccacaaatgatgataaccatatatccacaccaaagccagcctaagtattcataaatataacctgcaaggaaaggaccaaaagatgaaccaataccgtttgaaattaaataaactccaataaacttaccatgttcgtgtaaaaagaaaacatctgcaattgaaacttcaactaaagaatcaactggaccagcggaaaaaccattgacaatactgaaaccaatataacctgcaaatgttctacgagtaacaaaaataatacctgaaataattgctaaaattgttgaaaacaagtaaattggtcttcttccaatttttgctgccacttcttgacataacaaacaactaatagcaataaacaaccatgcaataccaccacctgtatttaattcattataagaacaattatatgtttcagtccattacatcatatattggaccatcaaaattaactgcagcaggcaacaattgttgaaaagaagaataaaacaataaaatgtaaaactttcctccattgtgcccaattcaaaggatcatttggatctgatgatggctgagggaatagaataatatcactattttctttggtatttgctaaacctaaacctgtaatttcttttccctcgccaactaaaactgttgttacctgggatagttaaatcatctcttaactcttgacttcctctactgaaaaacatcccttgtttgttttgtattgtgttgttatacaaaatgaaattattttagttgacttattttaaaataactggaatataatgttgctttaaataagatagaaaaaatacaaaatttgatgaataaagaaaatattttatcttcttatcttgataagttttcttttgttcttcttatcaggttatctactgtccgatgttgttttcagttaattcagctatttatcaaaaatttgacatcattattcaaataataatgtttcaactaggcgattgtacaaaatcagtggtaaaacattagtgtgctaaggtttttgtcctactaatatccaaggtttgtcgtttatcttaacgccttccgcgatcagtattttgaaaattaacgttttgcacagccgcgcggtagatacatttaattatttcctctttgggactgataagatttcttaagagcggatagcgtctatttaagaatcattagtgttaataagttaatgatactggaatccgtttaaaaagtcacaacaatcttgaaatctacagtttagatacttgaagctaaagaaacaaaaattcttcataacaccaatgaccataaaattcgactggaagaaggctgccgaaataaagaaaaaagaagtggattcaaacattccaaatgagtggattctaccttctgaaattttggaaaaatacgatgaaactacacctgagtctgttctagatgtaccaaaacaatttttgaatcctaaagaatttgagattaccgaattttatactgcaattcaattattagagaaacttaaaaatggcgagtttactgctattgaagttgtcaaagccttttctcatagagctgcaattgcaacacaattaaccaactgctgtactgaattaatgtttgattatggtgaaaagagagctacatttttagatacatatttgaaaacaaacggtaaaccatatggtccattacatggtttaccaatttcattgaaagacagtttcaatattcctgggtatgactcaacattaggatatacctctgagattggtaataaaccaaaaaacaaaagtgatttagttagggaattggaagatttaggtgctgttttctatgtcaaaactaatattccccaaactttaatgactgcagattcagagaataacatttttggtagaacattaaatcctaataatttgacactaactgctggtggtagtagtggtggtgaaggtgcattaatcaaaatgagaggatctattttgggtattggtactgatgctgctggatcaatcagaattccagctctttgtaacggtgtttacggtttccgtccatcatcaagaagatatgctcatggaaatcaaatgcatttagaaagagatgcatacattgatattaaaactgttgcaggtccattatcaacagattttgaaactattgagtttttaacaaaaattatttataatgatgaatcttggagatatgaccctgataactttagaatctgctaccaagaaccaaaaattaaacaatcggataaaatatctataggtattatcattgaagatcctagcttttccagttcacccacctttacaaagaattcttagagaagttgcaaaaaaattatcttccaatggtcattacattgaattcattgaaaatttcccatcttatgaaaaatcatgggaagttgcatggtcatcatttgcaactgatgaaccagtcagctaccaaaatctagtttccactggtgaaagaattataaaatctcttcttctaccatgtgatgtatatggttcagggccaaaagatattgatgaagttataaaattaaagactgaaattaataaaatgcacaaagattggctttccatttatgataagtatgatgttattgtttcacctggtgcgccaggaactgcaccaccgcatgatacttatggtattgcaccttatacaactttgatgaatgttttggattttccaagtgttatcattccatatggtaaaattgaaaaagatgttgatattgatgtggatgttgaatatccaaaaatattagatgatatttatgcacattattcattgaatctttataaaggtgctccgggtcatatacaagtctctgcacctcgtcttgaagacgagaagcttcttgcttgttgttccattattgataaagttttgaaacaatgattctgtcttatttattgattctctatactcaaaaaaaagtacttacttatatattataaaactatctactacaaataacttatactattgcaaaaatatttggtatgaaactgattcatcctccaagacttccaaacctttattttcctcccatgtaaacttcaagctatctatagctcttaaataacatgctatgtgggtagcttcccactccccatataaataatcaattactttttcttgctctagttttctctctaatatcaatcctataataaatatgccccacaaattaaacatttcgctatatgattccttcattctcaactcatcaaaagcaacaaagaactcatcaataattccccttctttgagttggaaattttgtgtctgaagtttcaagtagcataagtttgcaagttaacagtgctatataaaccatttttttctcacttttagcaaattcgttgagaaagcaatttgtttcaaaaagaagattcaaatatacttcgtcttgatatgacttttttttaaatatgaatgacgttttggcaataatgtgcatcatatcaatagtatcccaaagtaataagtttgactcccttgtaacattttttggaaaaaaattcctaaagatatcgcataaaatgaatggattgtaaaagtctaatactttatttggtatcatcaatattgataagacataatgataatacaaactttccgtcaaaaacgccagtgccccagttggcttaataaagtttttagccaatacaagctctattcctgaataaatatcactcaagacttctcgattgtgagtttttatgtaaagctttttgagtatactgaaaagtagtgaaaagagtattaattcagatgagtgtttatattcattacttttttgaatctcctttgttgcctcagtatggatttggttgacaattacatgttttgaagtatctgggctaaatagttgcgcaaccgatactgatgttatcatttttcgaaattcagctgatcttttcaataaatctaaagtgaaatcagacgcagcttctaatgattcttttggcaaaagtaatttgattgtaacattaaagaaaatattgaaacaggtatcaaatgaaaagttatcatttaagcataatggaatgtgctctggaattctaattaaggtattcttttttaagggtataattttttgttcatcaaatggagactctatttctaaagatgggatatattctgtctcttcgagtgatatcacctcctctatacttgggctatatgggggtgagttggtgtaaatgcatgaaatatttcttcgaatacacctatcacattgtggcttgttttcatcacatttcttttttgatttgacacagcttaaacaaccagttttagacctttgaaagtgtctattagaaaaggcattaacaaggtcagatccgttttcatctacaaattgtttgaaagtttgatttgcatagacacattgtaattttctccttgaacatagactgcaacttggtttaatctcatcgcattttttccttgctattcggcatgacatgcatcctgttttagatcttttaaaaaatttctttctatttgcaccctttggctctgtcattgcgttgactcaagaagaaagatgttcattatttatttcaataaagaaaatcatgataagaaaaattggactccgatcttggggatcgggaatcgaagtcctcaattatgtaatctcattatgtaatcaattttatttcaacatgaaattctacatcgtcaaatcagtacagaaaacagcaataactaaacgtaaatctattttgtaacagtgataatataatgagaacatatctggacatagtgaaaaaggtggatgtggtaccatactctcatgaagctgaatatgatgactttgtttcacatttctttagattaaaatctcatgacggatcatttaatttgggatatttgattccatcggttgtaaaagagttatttaaatatccacaatattttatgatcaatgacaatattgtcaaattctctttttctttagatactattgaaaaacgtgaggaagctttagaaataataggtaatgaatggaaaaaccaaggattatttgatacgcttaaaggatggagaaatgaaaaatatacaatatatggaccaataaatgaagtatatttccatttagaacgtgcaatgtgcccattatttggtgttgtaatgtatggtgtacatattaatggatatgttaaatcaccaataactggagagatcaaattatgggttccaagaagagcagctaataaagcaacatatcctggaatgctagataacaccgttgctggtggtttaggatatccatatggaccaattgaaacttgttataaagaatgttatgaagaagctggattagaagaaagttatgtgacgaagaatatcaaatcatgtggagttatttcatatttatatcaattaaaaccatttgattttgaaagtgaattgggattagtacagcctgaagttgaatatatatacgatctgtacatggatgaaaatactatacctcatcctgttgatcatgaatctgaggactttcaattaatgacaattgatgaagtgaaaaaaagattgctgaatggtgaattcaaagataattgtggtgcaattatagttgactttttaattagacattcaattataaccccagaacttgaaaaagattatatacaaataaatagtaaattgcatagatatttaccattccctgttagaagtaactaattatttgttttatttttatctagatttataaaagttattatttactaaaatgtaatttgatattcatccattctctacttataacttcctttggagttaatgagacattaccatatgtaattggagcaaagaatacaaaactggagatcaatacagcaagcaataagaagacaaatgagacataagctaaagtgtttaaagtatttggcttttcacccttttgacaccattctaatcttctattgtttgtgaataaaaattcaaaaactgaagcagaaaataatgctgctaataaatgtgcaggtaaataatgatgtaagaatttttgtctacccattaagaagaatggtaaataatggattaaatatgcacttaagaagaataaatttgttaaataaagttttgatcttgcttcctttgttaaaatatgaatatctctatgagctgttaattgatcaaatacaactatgattgtaaaaactaaaatcattgcacattcaaaccaccaacctggaatattaccaacaaagaaaatttgttgtcttagatcattattagtccaaaatgaaacacctgacatacataaaggccaagcatcaggttgtgaagcaaatgggtgttcacttgataatttattgttatgttcaaacattaaaaattgtaattcccaccattttctgaaaaatggtaatttaagaacaggttttggaacaaatttagctctttcacctgataatccaacaattttatcaacaacccaattattttcacttgattgaatttgtttattaccattaacttcttgttgattgaatgcccattcaggtaataaaacatcatcatgagtccacattgcaacaacagttggaacatgtaaaaatttaataattgaacctttagttttcaaaatttcatgaggtttaccatcaactggatcaaatttaaataatgtatcagcatatctatttgaatcaccttcttcaattgaaataactgtaaattcttcattggttggatataaaggagatgcaacatcatgagttaataaataaccattagtatgaacatgtcttaatctaaaggtatcaccttggtgaactggtctattcaaacgtttatcatcagtttctctaacgggtaaaatttcccagtaattggcagcatcttcattaaaatctttaacacatgtaacttgttgaccttgagatgaaattctaccatcatcataacgtaatggataattatatggatgagaatgtaagaaacaatcagtatttttatgtttaattgtaattatatcataataattaatttcctttgcttctctagctaagattgaatcacctaaagtttcttgaaattcagagctcataaaagcatcgccaggacctgattttgttaaaattgcaaaatgaatgtagaaccaaccaagataaatgaaaaatggaacaactattaatagaacaaatctagcaataaaatgtcttgtaaattgtcttatcgttaaaccagtcttataatctagaagattccataaatcaactgcaactgcaataccaacagagaagaaagttaaaacaccaacatatttagttgaaataacacaagataatgcaaatcccgttaaagttaaccatttataccaattgaaagtgaatggagaatttcttaatttagtgaatttaacataacaataaattgaagcagcaacagagatgattaaagttgcatcaagtaagatcaatctagtttcagcaacatgagcattatcaaatgcgacaattgctgaacctaagatacaagtccaaactgaataattacattcttttaaagtttcaaacattaatggaacagttaaagtacctaagatagcggataatgatcttaaaggaatataaggaattgaattatcaatatagctatcaccaatattttcgaatttaaatttaccattaaaacctactaaccaaccaacaaaagcgattaacattttagcaaatggaggatgtaaatcaaagaaatatgtacgttcaatataataagaagcaaatttaccaaaatgaacttcatcaaatacaacttcacttggataccaaatgtaataaaatctagttatgaatgcacaaaaagttattgcaatattagcaactgtataaatatgagatgaagttgaatttgttgaagatgatgatgaaatagaagttttagcagctgaaataatgtcaacttcatcaatcaaatcaacagattcattatgatcaatctctacagttttagagaatccaacactcttcttagcgttcttcttcggagccattggcagatatttccaagagaagaaaccttagagaacaaattgttataaagttgacgtgttacaaatattggtgttagagaaagcgagaaattgaaaatttacatgtttatttttcttatgtaagacattaaattcagactctgtgataagacatgtgtgttcttttcctttcctttccttttcttctctgtaaataacagctaagtatgtatcttaatagggtgagaacatctgctttagtgtctttgagaaggacacatgcacagaaacgtttcttttcatcagatgatatgtttgaagctttcagttcgccatcatcaggaactaaaaaagaatcaaccagtaatgcaaatgcaaaacctattgacccagttattaatataaacagagattattcagcatcaaatgaaccaaaaacttctattagtgatatatttactaaatcattaaatgattttacaccaatagatacaccatctaataacaatacaacaaattggtcagaatcttatcatggtttaggtaatgcaccatttagtgttgaagcacaaaatattttaaactcatcattacctgatgatgatattgaaattacacctgatggattattatatttacctgaaattaaatatagaagaattctgaataaagcatttggagctggtgcgtggggtttagcaccacgtagtgaaacattagttcaaacgcaagaatttggaggtttattaacaagagaatatggattagttattcatggtagattagtttcaattgcaagaggtgaacaaacatttttcaaagaacaaggtataccaactgcaactgaaggttgtaaaagtaatgcattaatgagatgttgtaaagatttaggtattgcatctgaattatgggatccaagatttattagaaaatttaaaaaatcaaattgtgaaaatatattcgttgaatatattccaacaaagaagaagaagaagatttggaagagaaaggatgaagatgttgaatatccatataagaaataatttacttgtaaatagataattaaataaattgtataactaaaggtgattaaacctgatagaacaaaaaaaaattacccagcattatcactgggcaaaacttgcgctccccagatatgttgcccatgaaaagcaaattattactaaggcggatctgtttaattattataatacttttcataaaacccaaaccaattacttttttcttttttaaaaaaggaggaaaatattactattccataaaattatataaaacaaatgattaatttatttataaaccttgaacagctcttcttctgtctctttcttcagcaatagataatttaatacctttaccctttggtaatgaaacgtatggtttacctgcttcgttaccaataataaaaacgttagataatctagtaatgaaagagttatctaatgaatcctttaagtgaactaaatcgaaaccaccttcgtgtctttctctgtgagtgataacaccaactctacctaaagaacgaccaccagtaaccatagctaatttaccagtttcaaaagcaataacttctgaaattttaccagtttctaattcatatttgatagaatcaccaactttgaattgatggatctgggtatctgatagttctaccatcgtgtgtaacaacatatgggatacctttcttacctaattgaaccttcttaactttacataatttgtatgcagcttcttcaggagtaattctgtgaattgcaaatctacccttaatatcgtagattaatctgaagttttcgttggttgcttctaaagtaataacatccatgaaacctgctgggaaagtagaatcagttctaaccttaccatcaactttaacatgtctttgcattaagatagcattgacttctctaccgttaagagcatactttaatctgtttcttaagaaaacaactaatggtaaagattctcttaacttgtgtggaccagcagaaggtcttggtgcatagacaccggataatttgtctaacatccagtgctttggagctgctaatcttttcatgtggtgctttctataataataaaaataataataaagatgaagtagagttagtattatgttcataaagagtacgtctcttatagtaaaaaaagataattcttaacaagatttaataaaaaatcttgcttggacaaacttgccctcatacaactttcataaaagaaagttgtaggttgaatacaatctcaatctcaataaatgaaaagggatgcaaacaacataataaaaataagttttatgtgaagaataattaccttttgcactaatgatagattataataataactaatttgattggatcataatcagaatgataactatacatacggtcctctagccatttttgaatatgtattaggttgtctttagaagataaatcaaaagagggtaaaaatggcagaaaattaattatacatttgaggaactacttaccttatataaatgaggttgaaaaaataagttgaaaatgcgcgtagaatgaaaaaaaatgaaaaaaatggaaaaatggaaaaaatagaaaaaagctgcgtcccatatcccaaagcggtaaaaagggtttccaaccctctctttctctctttcccttattgccagttctttatagcgaattgcttaagtaattcacctaaattaaattcattatagcaatcattatagagactgacattggtaattaattctttaaagagttgtttatcaccatcacatgcaattgataatgctttgagtataaatggttgaataaaatcataatatactacatcagtatatgcattaccattgttttcatatgtttggataacattaggtactttgtaaactggtatctttctatgaattgtatcatctccatcattacccttatcatcaattgtagtatatccatatgataattttatatcattaatattattatcattaatataattatcattaatataattatcattaatataattatcattaatataattatcattaatataattatcattaatattataatcattatcctctttaatggataattgatgtgaatttttcaatttgataccattactaagaatataatcaccactattcaatatccattgtaatttaattgcaatttcacttggtatattaggtataacattccatttattcttaaatggtgatactgtaaataatgaattcttagtaaactctcccttatataaatcatatcttataccacctgtgttaataagtatgattctatcattatttgttgaatttaatgaaaatggtggctcagccttatcattatcgctattattatcatcataacaaatttttggtattaattgtggtaaaattgaattttcaagaaatcttaatagtgatttaggatctggtttatccttatggtaatattcggctgcatacatgtaataattttgtggtacatatccataaacttcattgagatttaattcttcactatattcgaataatttttgagaaaccattaatcccttatctgtattaaatttatcaatttcattatgatttgtatgatgcataaatgaatgtaaattaaaatcaatatatttcctatcgactgtaatattttcagtattttttagatcatcaattgataaaaatcctattgtttcacaatatctaccactttgtaaacctgttgataattcatcaattattgaaaaatctcttatatgtgaatgacctccaaaatattgtataaaagtatctgggaaatatttccttaatatggaatgtaattgatacatttcaaaccaatcatgagatactggtaaatgtccaaatatgataattaaatcaacgggataatttgttgaataatcaataagtatatcaataaaccattgttcattaattatttccattataggtaaaacttcaactctttcattacccattttaaaatcaaacatgaatgagaatgaaagtatattataaccattaacatttgattggaaatatctatattgattaccaaatgtaacccaattaccatcatcatccatgtataagacattggttgaaacaaatttttcaccataatgtttaaccattgtatcatattctaatttagatacatccgcattatataattcatgattcccaacagttattaaatcataatcaacatttttgaaaatatcattagattttaatccattaggtgatgttaaatcacttaatccattaccatcatgtctatcacctgtatcaataataagtaaatcactatcattatgattatttttcaaattttcataaaatgatatgaaatccccccaatcggaggaatattgtttttgattagtatgaccaatataccaaccatgggtatctgttgtatgtaagaaattaatctttccaaaagttaaatttcttaaaggttcattaaaatttggtaatttagcgtttaattggcgatttattgttatactgtttaagtatatgagtgtagcaatcgccaatgatatcaattgtgatatgatcatcattatctaaaagaaagaaagaaagaaagatgaacctaaaaatataaaaagtactgtaaagataacataagataacataagataaagaatcatgtaatacctctattcgaatcctcacacatgatttaattcttcccgccaataaaattttcagtttccaaaaattggaaattggtgaggggaattcaacagcatgtaataataataataggagattacaagtacaatctattctttcaattctacaagggtaaacacagtaactatgtcagaagaattcaaattaccaagacctttcttccttaaggattcagatatatccaatgataagtttgtgcccgtcgatacattctctgaaactaagaaaattacaatttattcagcaattttcttaggtggtatgcacgttagaagacttttacaacatagaatgggatcagctagaccaggtcaagagagatatcttaaattatttgaattagctccaagacattttatatcaattccatttgctttagcaacttatagttttatgtcaaattctttatataatttagatgaaggtagattaactaaaaatgaaattatttctgcttcatcagctgttttagttgcaacaattttcaaaaaaatcccacttaatcaaaaagttggacttgcattaggtatgggtgtatttgttggcttatttaattggactggtggtttagttggtaatgttaaaactaattttactaaaatgacacaaaatggtgaaattaaaaatcaagaatctaataaatcacttgatgaagattttgctaatggtacttatcaaaagcaaggattctgggaactcttgtatagaaaacctttatctgaaacaattgaagatttaggtgaaggtagaggtattggtaaaatttaataactatacttaccatactctttcaaactatatactatacacacattatatttattcatctttttataactcattattattcaagaaaaaaaaaattaaaatactataaacacgtatatgtatacattacacattacaattaaatatttgaatgtttaactactactttaactttatcagcacatgaatacattttatttaattttttgatttttttctgaaatcctaatgcacgacttttaatactataactatacttaataccatcatttggtaatgttataatcaatgaatgtttagttttattccttgtatctttttccttttcatcaataatttctttatcattaataaattcaaataataatgaacctggtctaatattaccacctggatgaataccacaaataacatgcatcattttaccaattaatttagtccaataaatcatcctttcacctcttcttggagctgattcaattactaatttttctaaatttgaataatatttaatttcacttgatggtaattctgctccccatctttcacataatgcaataccaatcaaagctcttgttctatgtgataatccatgactacctgaaattataccacttgttgcaacatgtaatgcagcagttggttgtaattctttagggtatgaacaatgaacgaatgcaatattacataatgcaggtaatattcgattttcaatttcttcaggtactaaatcataattagttttaggtaaaccagttttcaataattccatataattatgagctaataaaggtgaataaggtcttgttgccgttataattggatcttcagatttaattgatttatcaaacatttgatataaaacaccttctctaacaccaccttcactaaaatgaacagttctaattttcggtaatgattcaaaagctgctgataataataaaccaactgaaggtaattgttgttctcttctatttgaaacacagaaaattttatttgattctaattttggaattgattttttcaataataaataattagacatattttcaactttattaaaagttgttgaataaccatttataattgtttgaattggataatcaatttcattagcaataagtaaatgacctaaacctcttaaaccaccaccacaacaaaataattttaaaccattattattttcaagatcaattaataattcttttggtaattgaattttttcaattgccattttataattatttttaatttccaagaataaatcatttatatcttcatttttaattctatttgttaaagcagctgcaccataaggtaatgaaaccggagtttcactaattttaacttcaccatttttagaaataatccaacttaattgagttgaaccaccacctaaatccataaataaaccagaaacttcttgaaaagaacttgcaacaccataagaaccaacaataccttcttcttctttacttaataattgaactttccaaccagttgcattgaaaattttattcataaattctattgaatttgaagcttctctagttgcttcagttgcaacaactttaacaccatttgaaggtacaccaaaatcttcacaaatccatttaaatcttctcattgaacgtataatttcattaattgcatcttcaggtattggattttttaaatgattattttcattattaatttgagcatcaaataatgaaatacctaatctatctttgaaaacacaagggcattatacgagcatgatgaggagcttttgaagaaattgaaaatcttataccatttgaaccaatatcaacaattgcagttaaagctcttgcaacaattgaagcttcattttcattatcattatgattatgattatgattagtattatcattaatattatcattatcattatcattatgtattatatcatcatttatatcaatatcatgattaagattaagattaagatgagatctattatcgaaatcatccaatatatgactatcaggagtatttactaatctagtactatcaaaagacatttcctgaggattaagatcaaacatttagtggtttaaaatggggtacgataataataataaatcatacaaatgaatcatgaaaagataatttttccatttcccaatatacaactaattaattaattaagtaatacacctattactcactgattaatattagtattagtatttaattaatttcctcgctgttaattatattaataattattactatgaggaattggatttactctattttatactggtatattagtatagtatagtagtatagacattgatatagacattgatatagacatatcacatatcagataataatacatatgacagaatacgatattgattttacacgtattggtaaatttttaacaagatgtaccattaatctaatattaccatttatcaatggtatgatgatgggatttggtgaaatatttgcacatgaactatgtttcagatactcatggcaatttgcaagagttgtaccatcaaatagaaaagtatctaatggtatacactcttcaagcatactaaacagggcataatacagtataatcattcactcggcataattacgtaataataataatttaataagagaggggggctcgtcatctatttaagcataaactaactaccccacaatcaattatatcaatattactatcaagtccccttgacttggggtttaaatagaattaatttcccacaatttagatatgtatgtgtatcaatctgtctaatactcttttatagacaaaataactaactattccataatggactcaacaattgctagaggtaatgtacttctcattaactcattacattccctactcagtttttattcaaagagacgtaaatcaataactagatcttgttatttaattattgtctatacattatttgcaactggttcaaaatcaaagaaatctaaaaagaaaaaaagtatagaaaatcaaattaccaccccatggtggaaatcaatatcttccttaaaggatataagattattatttaataattattttcaaaattctccaactttatccctattaactcaattaattcattcaaataatataaatactttaattcatttcatttctcaaatttcactcttatttattaaagcttggattgccctaactgttgctaaaattgatggttcacttgtatcttcattagtttcaagaaagtttaaattatttttcaaatatttatccttttggttattattaggtattccaacaactttaactaattcattacttgtaagatcaagaatgttactatcttacaatatccgtcaagttttaacttataatatattaaatgattatttaccatcaaatgggaattcaaccatttatcaattaattaattcgaaaaatccttcaaatatctcaatatcagatcctaatcatagattaacttccactgtggaacattttgcaaatagttgtgcaattttaccttctcaattacttgcatccagtattggatatcttaattgctggtaatcatttatcaaaatcaagtgaaaattcttcagaagggaactcttttattaggtctcgttgctaatttatcaacttttatattaagattcttcactcctaattttagttctctaaattcaatgagaaattcattggagaataaatttttggagttccattcaaatattatattgaataatgaagaaattgctcttgctaaaggtcattcaagagaaattgatatcttagatgtatcctattttgaatatgagaaattcgaaagaatgtccttacgtagaatggctatttacaattttgctgttacttttattttaaatatactttaggtgcttttggtattttcctttgtgctgtaccttcattcactgcatgtttatactaatggcttcatccaagatgatgatgcaattgctaaattatcttcagattttgttgcaaatagaagtttattattaaaggcaagtgatagtttaggtaaattaattcaatcaaagaaaaatattccaaaatataacaggttatgctgatgaaatttatgaagtttcaaaatattttacgtgatataaatgattttgcaaagattgaatcaattatagatactaatactactacaggctccacaaatgatgatgcattattggctggtccaaatgtttcttatggtgatgaaatcacttttgaacatgtaccattaattacacctaatggaaacgttttggtcaaagatttatcattttcaattaaaccgggggataatttacttattattggaccaaatggttgtggtaaatcatcactttttagaatcttgggtggattatgggatattaaagatccaggtaaattaattgtacctcattcaaaaaaagatttattttatttacctcaaagaagttatttcacttatggttcattacgtgaacaaattatttatcctgattcttatgatgattatagaaataaaatatttgaattaaagaaaaataatccaaatgatgaaattattaaagatgatgattatttaattaatttattacaaaaagttagtttagaatatttacttgaatgtgattattctgatgatgattcagatgatgattttagtagtaataacaataatattaatacttctaacttaatagaatcctccattcatcattgtgttttcatgaacccatgtttagataaaattgaaaaatggccagatttcttatcaattggtgaacaacaaagattagcaatgattagactttattatcatcaaccaaaatttgcagtcttagatgaatgtacttcaagtatttcatcagatttagaaagagaatgttatagaattgcaacaaaagatttgaaaattacagttttaagtgtttgtcatcgtacaacactttggaatttccattcaaagatattaaaatttaaaagaattaatgaaaataataatacatttgataataatgaaggtgcagcaacaacaattttcacaaattttgatcctgatttaagattacaacgtcatgaagaattaatttcgattgataattcattgaaaagaagtgatgaattatctaaaagattaaataatttaaaaaatatgaaaaattcaagaagtggtagaagacctgctttaatgtatattgatgatgatgaataattatatagttaatacaatatagttataaaaaaactacacatttattctcttcatgcataattgtataccaatcaacttttgttgaccatgatttaaccattatatcaattgcaacatcagctgaaactgaacccatttgttggaaatcatttaatttttctaaaaataatttacgtttactaatatcttgacattcacaaccagctataaataatggtaaaataacacataaagattttggttcctttgtatttaaatattttgttaatgtatttaaaatttcaattgacatttcttgtataattttagaatttgatggcatcaataaaactcttttgtataattgaattaatcccattaataaaaaacaatgatttgatgcaataattgcattaattgattttgaaattaatgtatttgatgtattatcatattcaacatattttaatttttgaaatttcatttgaatatttatagctgattcaataatttttggtgttaaagtaacagaatttatacccattctttcatttgatcttttaattaaattaacatatttaattaatttgcacaatttggaaaaaattggtaaaaatttaatcttaaatccaagcatataatcaatatccaaatgagattcttcctttaaaacaccatttgtttcgataacttcataatcaatttgattattttcattattattttcattatttaaatcactcaaaatttcattattttctaaattttcaattttttccctggatattattatatttggtgaattaattaaatttgaatttggtgatgaaaaagtatcagaaaatggtgataatgaatcaaaattatttggacttttcttacaattattcaatatttcatcaattgttggttctaatggtgatgataaatttgcgaaaatatcaatatatgcaaaccatctgattaagaaataaagtaattttgatttcttaatttcaccactaattagtgattcatcattttgaaaatcttgaattaatttattaaaaggtttattataacctctcattaaaaaaatttgctttgctccattcatatgaactttccatttatctgaattataattaaatgctaaaaatgatgaaaaaaataaaataattgttaatgttaaatcagatgtacaagtttctttattatttaataaaattaataaatctgataatgctctacttaataatgattcaattatatcatttgcatcaatttttaataatgattgtctatgagcagttccaaatgcaacaattaatgacattaaaccttcatttgtcattgctaattttggtaaaacaattttaaatggattatctctataaattgttaaatctgttggtgttaaaattgatgatgttgaatctaagaaaaataaaaatgattcataataatatggtacatttaatagcatatcaggtaatggtaatagacctcttggtattgattctaatatttccgttacagatgaggttgtagatgtaattgattgttgattatatggttctattatggaattattcacctcttcttttcttcttcttcgtcatcatcaatatgactgcgccttttacttgattcatttatcattgggatagaatgtatattatttgaagaatctagtaaattttgtattttactcaaatcaaatgcaaaatcatttaacttataatcatctaatggtaattcaggttgattttcaaataataaagattcattctgtgttgtaaggatatttgtattattatttacattattatttacattagttccatcaaataaattatcatttgagaaatttgtagtgttcaatccttcaaataatgaccaaggagcaggagatgataatttttcatcaaagaaactaccaagtatattgttaacagtttgtaaattatttgatatatcatttattggatttattgctaattctgggtctaatgaagggtaagttgatattatgtttgtgtgtgtatttgagtttgagtctatatttctgtctataattgtatctatatcatcattttccttcttaattattattgggtcattatatttaattttatctattatattattaggtgtattgttattattattactgttattactattattactattattatcagtattttgttcgttaataaaagtaaatgattggttctgtgattttttatttttatttttttttgaaagttttattaggttgttcagattatcatttggatctaaagttggttctattatagtttttatctttttagaattggatttctttttagttggaatagtactagtactgtcagtaccagtactattattagtattattagattcaaatagttgttgtcttgataatgaagctaaaggatttaatttttcaattttaggatttttatagggtctaccaccccaagttaatttaattgaataatcacaagatttatttgccttaatacaattcatacatgaaggacgtaattcatcacatttaattttagatttcctgcatattgaacaaccatttctgcttcttgaaagttttagttgtatttgtagatttatttgattttggaggcatgttaattttttttaactcatttacactttatagttgatgttttatgatgttttatgatggatattagtacatttacaggtagatctattaatgaaaagttaataaaaatttaaaaatctaaaacactaatatctatctcttactcagataatcaatattcatgtcgcccaaaacggtatttccccattaggaaggtgcaagcggtggcatatttattgtaacattacgtaatgcattgttacattgtactataataataatatagtattgatttctatactaccattactctcttgaaagataccaactgtctcataattaactgtcagtatatacacaatactcttcaccgttagttcattcaatagcagtatcgtgatatgtatactaatagcaaatagagaaagaataaacattgtagcatagcgtgatgccaagcggctattaacaaattctctcttttcttttactaattttttatttcgcaacttccattgacatcaattaatataatttttttcttttagtttttaaggtacgtatagccataaatatttagtaggatagtatatttcttgtagaatatcttatagaataactcataaaatacactgattcaccatgtcacagtcatctaataacacgggtgaattgaatagatcatcctctgctttaagaaatagaggtattaatccctgtgttcaagctaaattattagcctttcaagcaaagagacaacaaatgcaacaatcaaagaataatgttaatgataatagtaataataatgatgataataatgataataataataataataatgagagtaattcaaaagattctgtaccttcattaaagactactaaattaccattggaattcagatgaatgaagatttaatgaatttatctcctcttgtatcaaaattaaataataataataataataataatcaatcatcaaatactaataccaataccaataataaatctccttcaactcctctaagtgttgtatctagtactttcagttctcctgttgtatctcctgatgatgataagggaggtttatcaagaagaacttctttcagattatcaaatactacaagtaatgaagatgactcaataatgagaagaactagctttagaattaataatagtaaagttaataacaataataataataatactcctgatgatataatagacaaacataagattgaaattgatacaacaactattgatcaatctgtatcaaatactaataaattgaatacaccaataaatacatctgcacctttatatccacttaataaaagtgtaagtttccttaatagattacagaaaaatcattctccaagttcaaattcaagttcagattctttatcatcaaatcctactttatcaaatacttctctccctaaattaccaaaattaccaagtttaccaagcttaccaggtttaccaaaattaccgataggagatgacaatgttggtaatagtgataataataataatatttatattaaagactcagatgataatcaaacaagtattgaaagtagtccaataactccaatttctgcacctccatttttaaataatagacttaattcatcaactccaacaaataattctccatcaactcctaaaaagaaactatcactttctcaaagaagaggtatgaaactgaattttaatgcactggatagttctagtagtatagattcatctaaacaagaaattccaactactactaaacctataataaataataataataatagtactagtagtagcagtacactcactaatcaaatgagtagaatgtcattaaattctaatcgatcgaatatgaataaattaagagataattcaagttccctctcagctagaagaaatccaatgaaaatgagtttagatagtttatcaaatagaccacaaccaatacctaatagaaataatgatacaaattcaagtattcaaagtattcaaagtaatgcaagtactcaaagtaattttagtactaattcatttcaatcatatgcaaaatatattgatattaaatcaggttcattaaattttgcaggtaaagcatcattacattcaaaaggtattgattttacaaatggttcatcatttagaatttcaatggatgatttagaaattttagaagaattaggtcatggtaattatggtgttgtttcaaaagttttacataaaccaactaatattataatggcaatgaaagaagttagattggaattagatgattcaaaatttagacaaattttaatggaattagaagttttacataattgttcatcagattgtattgttgaattttactggtgcatttttcgttgaaggtgcagtttatatgtgtatggaatttatgaaaggtggttcattagacaaaatttatggtaatggaattaatgaaattgcattagcttatataactaaaagagttgtgacaggtttaagagaattaaaggataatcataatataattcatagagatgttaaaccaactaatatgttagttaatgaacttggtaaagttaaattatgtgattttggtgttagtggtaatttagttgcatcattagctagaactaatattggatgtcaaagttatatggcacctgaaagaattaaacattcaaatcctgatgtttcaacttattctgttcaatctgatatttggtcattaggtttatcaattttagaaatttctaaaggttgttatccttatccacctgaaacttataataatgttttctcacaattaagtgcaattgttgatggtgaaccacctgaattaccaaaggataaattttcaattgatgcacaagattttgttaaaaaatgtttaaataaaaatccaatgaaacgtccaacttataatcaattattattacacccttggttatcattatataatgattatcaaggtgaagaaatactgtcaataattgttaaagaacaatctgaaaataaagataaaaaattagaaaatgaaaataccaataaagcctccattacatagtggattacaattacaatcataataattttatatatatcactctacgaactctctctttctatatactatatattctatataccactcatttaataattataaagtattacaaagttacatcctatacaaaacatgttgaagcacagagtcaaaaaaaatacattattgacttctaccaagtgctaaaaccagagtcaaattactgcccccgctctttttgacttctgcaaaacccctcgggggtcttcgttcccgacaaggaaaaattcaaagtacatctctggtaacatgaatatttttatttgcaataattttttaatggatttgattttattttatttgaatctgaatttcctttcaagaagaaaatgttcgtatctagtacaagaagtataaagttcatttcaagtaaatcgtttagtacaagtactaaattattaaattcattaaatacttcaataaatagagatgatagcaatcataattctgaaccacaagttataacacgtcgaagagaagtaactagattttccgatgatttaaataagggaccatcatttgatgattttataagtggacgtgctaaagatatgcttattgatccgttagaggcagcacgtaaagatcctaatgcaagattaccaaaatggttaaaagttccaattccaaagggtaaatcatttcatcaagttaaaaatgatgttaaagaattaaaattagcaactgtttgtgaagaggcaaaatgtccaaatattggtgaatgttggggtggtaaaaaaagtgaagcaactgcaactattatgttaatgggtgatacatgtacaagaggttgtagattttgtagtgttaaaacaaatagaaaacctgctgccttagatccaatggaaccaataaatactgctgaagcaatttcaagatgggggttaggttatgttgttttaacaaccgttgatagagatgatttacctgactggtggtgcagctcatttaagtgaatctgtaaagcaaattaaggaaaaatctccaaatacattaattgaagttttaagtggtgattttagaggtgatttaaatagtgttcaaacattagctaatagtccattagatgtttttgctcataatgttgaaactgttgaagatttaacacctcatgttcgtgatagaagagcaacttatagacaatcattaaaagttttagaaaatgcaaaattaaataataatcatattttaactaaaacttcaattatgttaggttttggtgaatctgatgaacaaattatgcaaactttaaaagatttaagaaatattaatgttgatgttgtaacatttggtcaatatatgagaccaactaaaagacatatgaaagttgttgaatatgttacacctgaaaaattcgattattggagagatgttgcgcttgatttaggtttcctttattgtgcatctggtccattagttagatcttcttataaagccggtgaagcatatattgaaaatgttattagaaagagaaagagaaatgttggtgtttcaagagaaatcgaaattggtgatgaagaatttatatcaaaggatattttacaaaaggctagtaataaataagtaattcattcattcattatattatatttttatcatttcacttgtcttgtttatagattataaattacatttctaattttgatacctagaatttgtcatttatttcaaattattattattattcataattttactatcttttctagatctacaatcattaattgttcatattgtgtattttttttttaatttttcgtttttttatataaagaactattaacaagttaataagtacatagagttaaaatatattattattatattatcatatttaagcttcttcagttgcttcttcggtcgcttcttcagtttcttcttgaggtgcagctttctttgcttcagctctttccttttcttttgctaattcttcaagaatttgctttcctaattcttcaactttttccttaagagcagcaactttcttttcatttgcctttttagtttcttcaaattttaatgcatctgccttcttttcagcttcaagtttttcctttaatgtttcaatagtttcaggatatttatcttctgattcaggaattgaaacattaagtaaacttaattgagtaacaagtgcagaattaacacctttattagctttcttattctttttaccctttttaccctttggtgcagttgcagagaaaaattcttccttttctttcttaataatttctgcattttcaggtaatttaatttcttcaacttttttattatcaacagatgatgaattctttaatgaaagtggagaagatttgttttcatcttcaaattggaattttggatctaataataaaatagttctcttgatattttcaacttgttcacttgaatctgaaacatttgaaaatttttcaagatcttcaatttcttgaagtaaatcttttctttctaatgataattcataagctttttcatcttcttgtctcttcttacgttcattatccatatcttgcttaaatttcttaaatttagcatcaaaatcatctctaatttttctaatttgttttaataattcaaatttttcattattaagagcttttctcttgttataaatttcatctcttttcttataaattgcatcatttttactagttatttcagctaaatctttagtaatttgttcaaattttgcttgagcttccttatttgaaacagatgataatgaagatcttaaatctgcaatctttgccttatcagcatcaattgatttttgaatttcttcgatacctgcaaaatctttctttaatttatttaaagcagtaatttcctttaatgctttcttttcttcaactaacattaaagaacctgattcaatttcattttctaatttcttaattttcttttcaatatcttcaacatttttaaaattatatttagaagtttttgaagtaatttcagcaattttctttttaataatttgatcagttgatttaatttgttcattaattgattgttttttatccttaatttcattttgtgattgaataacacttcttaattcagtggttaattcttgacgttttgcagtatcttcctttgaagcagtagttgtttcaaattgagatgtaagtaaagtaatttgtgattcaattttcttaatttgatcatttaaagttgcaatttgtttattctttgcaccaacatctggttgtttaatgaattttctagcctttggagcttcaatttctggaatttcaatagacataataatgattgttgtttattgatcaaaagagattaaagaaagaaagaaagataataagaaaaatgaaaatagaaaagaagcaataacctgtacggactctattaaatctctatttttcgtcgaacagatcgaatttgacaaatttcaaagaaattaatcgttttctcacttaactgttggaatttaaattttaattttgatattacgtgttctgaaccgtttaaaattttgaaaaaaatgaatagctaaaaaacaagcccgaggccgggtttgaaccagcgaccaacagatttgcaatctgctgctctaccactgagctactcgtgcatgtatagaagtgtttaaaggttaggattttcttgaaattgatattttatgtcacgtgacttggacacttacaaaaatgctgcatttctctacttttgtagtattgttgggtgcttttgaaggtttaattatgatgaaaaaagtttcaaggctgtatcttttttttacatgtattaattaataaaaaactttagacaatatttttcaccattttctacagtttttcacatgttagcttttaaagttaaatttttcaatattcactccgcatatttcatttaaaactttttttttataaatttaattgattaaatttaaacggcgagctgctaccaattattcatctaatattccatacaaaaagcgagtaactatcctcatttatatacatcaatctctcaaaaaagctagatcgcaaacatcaaagagacctattagcgtcaatgtcattcggaacaaaaactctcagtacacatagaaagagatgtagataaaaaaggtatgaaatcatcgggattatagttatatcaacgattccaggtactcttatcaggcgcggctgttaccactatatttttttgacgtttcttctctgcgaagctattaagtcaagtcccaattgtttgactattgataagctatcccacaatttctgtcaagtttgacagaaaaaataattattatttataaagctacttaaattgaatgttttcaatgttacttctttatttaaacttttattcttccttccataacataactaacagacaatggcagaccagcaatcaggttcttcaacttcagctttcgtctcatctttaatatttaacttgattatatttgcaatctttatatctattttcatattcttaagaaataaatatacaaatgtttacagaccaagaacacttaataaaacattaccagaccatttaaaagctccaccactttcagattcaacttttggttggttaccggacttgatgaccagaccaactaaattcgttattgaacaaactggtattgatggttattttttcctcaggtatttattgctttgggctaatgttggatttttctgtggtttaattttatggcctattttattcgcaattaacgctaccggtggtggcggtcaaagtggttttaatatcatttcttatgctaataatactcataaatggagagtttttgcaaatttgtttttatcatggtttttctttggttttgttgtatataccatttatgttgaattagtttattacactggattcagacataatttacaatgcactcaattttatagcagtttaccaagttctaaagttttacttattgataatgttgaagaaggtttactttttgaagattcattaagaaaattattcccagctgctcaaaagattgttatctcaagagatacaaaggaagcacaagaaatttggaaaaaaagaaataaattaattaataaacttgaaggtgcttttactaaagttatcaacaaatgtttgaagaagagaagcaaaattgaaaaacaaattgaaaagggaaaggaaggttatgaacttccaacaactgagggtcaaattacaagttatatggacgaaaaaaaattaccatcatataaatataaaccaattattggtaagtctaagaaagttttcaatgaaggtattgatgagatgaatgagttcaacactaaattaaacgttgaacaaactaaaattaaagaatctccagaaactttggataaacttggatctgtatttttagaattttcttctcacttggaactacaaagagcttatcaagcagttggatattctgaacattttaaaacatcaagaagatatcaaagttttttacctgaagaagtcatctggaaaaatgttgatattggctttgttgctagaaagtcaaaaagatcaggtgctattacatttttgactttaatgatcatcttttgggcaattccagttgctgttgttggttgtatttcaaatatcaattatttaactgaaaaagttcatttcttaagatttattgataacatgccatcagttttaatgggtattattactggtattttaccatctgttttattatcaattttaatgtcattggtaccacctattattagatggatgggtaaaattggaggtatcttaactttacaacaattagatttttggactcaacaatggttttttggattccaagttattcaagtgtttttagtcacaacatgtacttctgcagcatcatcagttgttacttcaattattaataatccttcaagtgcattggaaatgttatcaaataatttacctccagcttctaatttctacatttcttatatgttacttcaaggtttatcaattagttctggtatcttagctcaaattgttggcttaattttatcttttattattggtagattgtttgataaaacaccaagacaaaaatggaatagagatgtttctttaggatctccatcttggggtacactatatggtacttttggtttattcactgttattcatgttatgttatgcaattattgcacctattattattgcttttacttcaattgcattcttattaatttacattgcacaatattattcatttgtttatgtttctggccatacgaactgataatagaggtagaaattatccacttgcattatttgaagtttttgttggtgtataccttggtgaaatttcattgattgcattgtttgttatgcaaaagaattgggcttgtgttgttcttgaagctgtttggcttggattaactgttcttgcacatttatatttcagatatttatttgaaccagtcttagatactgttcctatcggtgcaattgaaggtaattatcatcagaagattttggtaaaatgcaaatcaagaatgttggtgaagattattttgtttctgatgaaagtggtggtgactttaaacaacatcaatcaagctctgattcattaacaggtaccaataagagtgactataaatcagatagtttcaatggtacattggaaaagaaagcaacattatcaactagatatgatagcaataatggtaatcttaattccaatgcaaatgaaaattatcaatcaccaaatgcaggacttgataataagttagaatattttccagcatttgatcaaattgaagaagatttccaaaagaaacaaaatttgaaaaatcacggttactctaacatggcatctaattttggtagttatattggtggtgattataagaaaggatttaggtatgcaatgacatggttttttagaccaaaggaatttttacaatattctgattatcgtccatacatgcctgatttttggactatgccaatttctaaaagtttaacagaagatgttgtttatcaaccacctgaaataaatgaagaaaaggaaccaattttatggattgcagaagataaattaggattgagtaaacaagttgttcaattatgtaatgaacatggtgttaaatgtgctgatacagatgctaaatataatgaaaaagcaaaagttacagtcacagaagagtcatatcctccaggttatgaatcaacaatcatgtattaggattccgggctctcattatatcttttattttaactgcttacattagtttttgtatttttatggttctttaaggtcttttttttgatattttttaataattaattatttaatttgcttttttatattatacataatattaaatctatctaatagattacaatctagtacaaattaaaaaaaaaaccatcattaactcattcaacttaatagcttctcatcaaaaaacttcttgcttttttctgaaattcagaacattactacacgtttcagtaaaagcatcgaatgctctaatatcagtgcagctgataccctttttaaacgaaaactaacccagtatttaatgcgttcaatttttttattaacagttaaaatattttaaagttactttaagaaaacattttttccaatattttttcggcatccttcttgtcaaggttccctctaaaagcatgaaatttattatatacttcgattggcatttgaaactcaccgttttcatcataacaattttcgtacaaacttgaaggtcctaaatcatcttcataataattatcatcatttgcattgacgttattatcagggttattattttcagaatgatatttttttactgcttctctaaaaatatatatcattgaaagagaatattgtacatcgttaactttcttatcgatcatttccattgttaaaggtttaacatcattaattgtcattttccttttcactgaaacaggtaatctcataaatcctggataatctttaccagcaaaatacatcatatcaaaactgaccatcttgaaaattagattttttctgtaaaagattgaataattcttgttcgaagtttctatgaatggtatatggtgtatctccatataaccttttgaatctagcatgttttaaatattttggattggagaatttaatgagtgtatgtctgtaaacttcaactttaagaaaatctttattacatgtaacgtagcctgggttatattttaaaatatcataaaaccaatcaacaaaaacttcactataagaaataggtttagagaaccttttcataaaataataatgagttaaaatcaatgattttctctcagcatcaattgaattaatatgagatctaagttcatcatgatacttattaaaatgacaagctaaatcatgaagtgctggatgaagtaaagataattcttcttctgaaagagatgaaacatttccaaatgtatgttcttcaattcccttttcagttattcttttttcaaaatctttaatgattttttcatcaatttcactaagcatatgaggttcaggcaaattggaattctgctccacatttttattgaaattctgcttcacatttttagatagaggagtcaccataacaaatccatcattactttcaacttgatgaaattttgtgtcattgatggttataatattccgtttagaaagaggtaaggatttttcagcatttgaaaccttcgatgaagatttcttacttactttattggaagatttttttggaacaaaaggtgtcataacaacaaacccgtcatcatccttttttttcctaaagcttatttttttatgatatcgcatatatgttcactatgtatataattcgttgttttattcaatgattaatgcttaatgattagtgattgatgtttatcattgaagatccattgatctatatactttaacgcgttttaatgtaaacgccaaaactatttacgtaatcaaatatttaaaactgtttaaaaaccacccagtcacgtgatgttgcgctttttaataaaaaaataaaatagaaaaaataaaaaaggaagaagaagaagaagacgacggatcgaagaagcgagaagaagcttgagaattggaaatttgaaatttgttggctttttgaagaacgtccatggattgattgatttatattgacatttggtcatttcactttaattctaatttatcttggtttttcatttttatttggtttattcctcttttgacatcttcattttaacaatggcttacactactagacaagtcggtgctaaaaacaccttagactacaaggttttcatcgaaaaggatggtaaaccaatctctcctttccacgatatccattatacgcagatgaatcaaagaagatcttaaatatggtcgttgaagttccaagatggactaatgctaaattagaaattactaaggaagaaactttaaacccaattattcaagatactaaaaagggtaaattaagatttgttagaaactgtttcccacataaaggttacattcataattatggtgctttcccacaaacttgggaagatccaaatgaagttaacccagaaactaatgctgcaggtgataatgatcctttagatgtttgtgaaattggtgaagctgttgcttatccaggtgaagttaaacaagttaaagttttaggtgttatggctttattagatgaaggtgaaactgattggaaaattattgcaattgatgtcaatgatcctttagcttctaaattagaagatgttgaagatgttgaaaaacatttaccaggtttattaagagctactaatgaatggttcagaatttacaaaattccagatggtaaaccagaaaatgttttcgctttcaatggtgaatgtaagaataagaaatatgctgaagaagttattactgaatgtaatgaatcttggaaaaaattagttgaaggtaaggttgctgataacaaaggtgttgttttagctaacactactttaactgaaacttcatcttatgaaccaaatgttgaaattccagctgctaacccattaccagatgctgaaattgacaagtccgttgataagtggttcttcatctccggttctgcttaaatttttctaaactaattttaaaaaaatatatactgtgtatttatttgtttaatctatcaaggtagaatcttatgaccctattaattttaattttctattttaaattgattgaattgcattatgaataaatgcttcaattttacaattgtcctttattccatcggtctctactcctccactaacatcaactccacaacaaccttcaacagctaatgcgttaacaacattttcaggattaagccctccagccagtaaatatctacctttcatatctttaccaaaagttgctgcatcattccaatcaattaatttaccttcaccaccagcctctgaatctaataatggcattaaaaatttatgtgtagttaatgcattttcaaatcctggtttgttcaatacaaatctaggtattattggtatatttaaactatttacaaattcatcaacattctctgatccatgtagctgtacaatatctaaatttagttccctacttttggcaagaacatcttctaatgattgatttctgaaaacaccaactgcgaaaggtccattttctactatacatttggatactgcttcaaaccattcaggtccttgaatatccaaacttttcacatgttttattagttcagtagatgtttgaatttttgatcccttttttgatcttttttcagcacaaagttgaacaatttctttagctgattcatcatctattgttctagctcttccaggaacaagaatcatacctaataatgatgcaccattttcaattgcaacttctgcagcttctttagttttgaagtccacacactttcactaccttttctgtcattaatttgcttagtttagtagtatttatcagtaaaaattaatgatttagaaaatgaaataatcttagaaatttgagtcaaaaagaagttttgtcgctgattaaataaacgatgtcatttgtaatttaaaccatcaacattaatctttcttttgtattgccattgataaaaccaacttaacatcataaagctttaacctatgggcttttttcaatcatctggtaacaggaatgaaaaaagattttcaaaaatacaagaaacacgatgattctaaggacaattcaccacctccgcaatatcccggagatacaaaacctcaattaccagagtcaaacggaccgaataccaccaccaataccaccaagggactataatacaaaggaggaagctccacaaatgaaaagagttgaggagtcaataccttcagtaaatattgcaaccggtgataatattttccaaaatccaataacgaccacacctcctgtatcatgtattcaaacatcgtcaattcaccctgttccactgccgaaattttacaaacaacaagttccaatacagaccaacaacttttatggtaatcttttggtagaacaacaaaatcttcctgtttggacacatccttatagtatatggaagtcaacagatgatcaatttagaggtcttggaatttcacacacgtcagcatcacaaagagtttatggggatgatcctaaatatgaaccccgttaaatatttcttcaatccagtgggaatatgttcaatgatgttatcagcggaagagtttcaatccgaaaactttgaattcttagttggtgatttggaaagatttagtgcaggtttgaaatttgcaactaagggaggtgaactgaatgttaagatagttcaaggtatgggatttatcacaggtgtatatgatggaacaattgtaccaacagtgttgtcaaaggtaggatttcaaaaattacagccaatggaatcattgagtcatggcttgaataaatacatcattacattatttgataatactcaatggataatatacactaattgtggattaagtcaacagtctgctaattgtttaacgacctcaaattttaatggacaaaaaataattcaaattgccaaattaccaaatcaagaattcaattaaacattactgatagtgttgccggttcttatgttgttgggtgtgagctagaaggcgaattatcatatgacaattcttcatgtgattatagtttcagttatgacattagcggacaatctaccaccggaaaggttctacaatgggtattaccacatcatgtagaatcaatgcatcaatcaatgattggagatttagctgaaaacatgaatttagattctacatgtaaaggtcatatgactgcatttataacaaaaaaatttacaatggttgaaaagttacaacctcaagatttagtgcttgatccatggtcagataagagtggtgtttctggatattctgagaactccaagatgaaaataagggaaattgcacaaagtgaaatcaatagctttgatgtaattaacgaatccaataccgattccatgtatacagcaggtaaaatattagataagggtgcatttatgctttatgttgccgcatatgttattaaggatgccaatttaacaaatattatgttggaaaaaatgaaaactgcattcaaaggtttattgataataaacaacaagcacctctatgttatgataacaattggaaaggaatagtttccacttcagggttacaagactggtaatttttactgcgattttggtaattgcttttacaatgatcatcatttccattacgggtatcatatacacgcagctgcattggttgcattagctgatcagcattatggtgatggaagatggatgaataatgcgaagccatggattgaaacattaatacgtgatgtttgtaatccatcaaagaaagacacttactttccagtgtttaggtcatttgattttttcaatggtccatagttttgcaaatggattgtttgcacatggtgacggtaaagatgaagaaagttcaagtgaagattatcatgcttattatggtattaaactctggggattggtatcaaataataaatcacttgtatctattgcttccttgattttatcaattgagaaaagagcaatgaatatgtacatgctttacaaaaatgataatactattatgccttcaaattttatccggaataaagtatcaggtatattatttgaaaataaaattgatcacgctacatattttggaatgaacaaagagttcatacatggaatacacatgattccaagtaacaccaatgtcaaattatattagagacactgagtttgttactcaagaatggaatgaaatggcattaggacaacttgcaaactctatagacggaggttggaaagggcttttaatgcttaattctgcaatgtataatccacaaaaagcatgggaattttttagccaaccaaattttcagatgtcttggttggataacggaatgtcccgtacttggtcactagcatactgtgctggaatgggtggatgttgatatataccgtttgtaattcattcatactatttaatatagtagtttggatgacgagcctccataaaatttagtacaccatgaattattttttcaaatcgtttctacggggcgaaaccttttttcttccaaatcttttgcccttgtagtgtaaaatcctttccttgattccgttggaacttttaaaatatacattaagtaaagtctagtcatcaggtttagtaacttatacagcacatcagcattctagttaacaattcattgatttcattgacgaaaacagatttttttttcactttattgaaattttttaacaagatattcacgtagaaaagatgagttctccaattccagaatttagctttgctaaaccaaaacctaggagaccaatcaatttaggtacaagttctagttttgattcctcaaatttttcagaaacaatttcaaaaaattctccattaccacatacaacaaaggaattgaatagacttcaagcctacggattagatataatcaatgacgatgatgaagctatgaaattattaactgatgaaaaatcacccttttatgcaactaacaaagcaagaaaattaaagcataaagccttactgccatataaaactgaaacaattagagatcaatataaatacttaagtcatatcattgcacatatctatatcgctgttaaaagtttagatttgaaaggtaatttaacaattagtgttgaagatttagagtctgcaagaaatgttattttaaataatcaagatcaaaatgcttatattaattctaactctacaatggatggtcaaaagtttgaaacattacacagcaacgaaagtgaagcaatagaagatgatgataatgaagaagatagtgattactatgaaagttcagaagatgaagatgacgaagatgcagcaaattccaccccaattatgaaaattgaaaaagagtcagcatctataattgcattgaaatattggactaaagaattgaaaaatttattgaaaatgggattagttataccattgcaaatatctattaaattaataaaagttttttacagtatttgtctttcaagaggtcaaacgattgatattttattttatacccaagccatcggtttactttcacgtgaaaagaaattattaattaaaaatggcttagaattggattgggaaccagtttatgaagagtttgcatccacattaggtaatccaactgtttttggcccaagtatgagagatggaagattcaaaaagttaatctcatttgctttgactgtcaaagccattctttaatcaagattctgctcctttgattatggaaaaaattattttgaaatgtactcccccaaccatttcagcaactttaacacattttacagttctgcttccaatgagttttaaacaaccagttaaagaatccgatggttcagtttcttatgacaaaaaggatatccgttattatttaccagttttgtttgatctttgggttaactacaaatctgataaagaaatcaactgtttattaaccgttattatgaatattgcagttgaaaacttaaaaaagggtgctagtgataatttaattttgaacagagggatctatggtatctttaccaaagaacaatttgcttacatgatgaatcaattgtttctttcatcccaaatccgccacaaggataatagaatgattaagtattgtaaattgatttgtcagataatcatcaattcattgagtactgaatatgcttttgaaaaagagggtgttttagacttttttaagacatatgcggatgcagtgtatacgatgatacatccatcaaacagtggtccttggtctagtgttttgtcagaggtggtcaaaaaaattgctttaagcttacatctgagggttcaaggtgagaaagataacagagatttgattccattatatcatccagattataggggattacctgaaggtcaaaaacttaatcaaactgttatcaaagaggtggttaaagtgttattacccttgattcacttaggtgcacaatccaaatcatcatctcatagaagaaattataacgaagctcttcaagttttatgttttatggagccaaatatggttctagacaacttacttacagattggtatgcttcttttgaatcaatcaattctacacacagaatcccctattgttattaatcaacttaacacatttagcaagattgatggtcgagctacctgtctatagagttcatattccaaggttactttctatgttacttccagctatcgattctaatgatccagaaaaaacaattttggctacagattttattaccattgtttccagtgttattccctttgctgatttagccgaaggtttaggtgatggcggagttgctgcagttgatttcacttcccaacatttggcatacttggatgcaaaattttataaaaagtcaccagttaacatacaatttggagaacaacagattccagatgaatttcaatatgaagctgaatttgaattgattgctttaaaatcagcaacttcttcatttaaagaatttttaacacaattctgcgacaattgcttcaagtttttggaattgggtccagctattgataccaacaataccattgagtctcaagcttgtgcattaatttcatattgttttgagagtttagtggaagcgacaagtgaagagctttacaatgttatttcggataaattttttgagtatgttactaataatgtcaaacatgaagttgctttggtattttgtaacattgctgaagccattgtgagaagagatcctaaaccacaattgaagagaattatggatttttttatgccccatatcattaatgaaatcgagcatggtgccggtatttcaagatcacaagaagttttacataaagatcagagattgatttggaatatgagaattgtctctggtgcaatttctggtgcttctgaagaaattctaccatatttaccagatctggaaaaattcttgattctacatacttataaattgaaaggaactgctggtttatgcgctgcaatgattgcaaattgtacattatctacaatctcatatttgaaaccagttgaaaaaagaattatctccgataaatggcttgaggatcatggtggtaaatattctgaagaatgttggggtggtttccaattttctgatactagatttgatctggagtatttgaattataaatggtatgtccctacaaatgttgaagttgacgctgcaacggaacattttgagaatctttcatcatcatcaatggagtacatcaatggtattgttgataaattaaatggttctataaagttaagtttagatgaggtcgatcaactaagtttccatgttgaattacttgaaggacttttgaaaggggtttgttgtctttttgaccaatcttacaatgaaaatttagaaagcaagcatttacaaaaatttaaacctttacttgctaatgataatggaatttcatcttcaccatctttggtcaatatagctaaatctgattctatttcatcgttgaatattgaggttttgaaaaataacagtaaaaatgtttctgacgaaggtgaaaagttaatcaataattctaagttgaacggcaagaattacgaaaaagatgatgactttttgatggaagatgaaatatcagatattaatccctatcaacagggagattgaaattgaaataaagagaagtaattctccttctggtgggtcaatttttagcaatgagtcagaaattccaactagatcagcaacccctaatttatctgaatcaattgatgctgtcgatccaactcttaccaaaagagcagatattttattttcttatggtccatatttttcaaatgatatttcaaaggctcttgatttttcttacaaaaagttacattccactagacaaaagattggtaattcattacacaatttgattaacgcactttctaatagtgaaggttatgttgaattgattggtaaagttattcaatgtatcagtacatggttgaatgattgtggttattacagtaatgacaacgaattatatactgacaacctgcacttcatctccatgcaagactttcctggtgtttttgctccatatacaagatcagttctaggttctagactggcagtttcccactgtagcagaattagcatttcatgctgtactaggttacctacaaaattggataaagttttaatcaaagatttagtttcacttattgcttcttcatatggtattacagcaactcatgctgcaagtgttttaggaacatctctaaatagggttatgaattgtacaagtgctatttttaatatttttaatgattgggaaaaggctataatgaataaagataaggatgtcttaatcaatatcatgataatgtttgataagaagaaattgagaggtctggtggagaagagttcatcaatgttgccaaaatatgaagagttgttatataaatcagctgcattgaatgaagatgaagttactatcatgagtatgagattatttaggtctattaagaaatatgttaagattccagcagcggtttgcatttttgatgagaagttgattgaatgcattagaccaccagatgctgatgttgatatgaaaatttctgttcttaaactagctaaatccagaaagaaagctatgttacataagattttatctaatttagttaacagttctattgattatctttcaaagaaactgaattggaagtttatgttactgattttagaattaattactacaatacaatctcatattgaaattccacttgaacagaaaacattatcaaccatgttaaagtttgttaatggatcacatccagaaatttctaaaaagggtatgttttggattgcctctatttttgatactgttgaatcaagagcctacaacaattatgatcttgataatatgctctcagtgaaccaatttgatccttgtattgttccatttaataatattgcaaaagaaaatactgcagaagaattttttaaagaggttaaagataccaaaaatcccaaattcttcattgataaaaaacaatggataccatcttatccgtgggataaaaatttaagagttgttgtcccaatcaataggacaggatttaatttcaacaataatgatgaacttgctattagggaattttcatcttatatcaccaaagattggttgttggaattattgaaaactcatattgatgaatctgaagcaacatctgcatttttcccaggaattgtttacttttttacttccataacatcactgataatatatggatatgtcgataatctgacattgaaagatttatttgatctgactgatgaaatatttaagggtgatgaaagacctacacatgttgccattagtgaagttttttgtggtgttttatttgcatgtaagaatgataaaaaatcaatgaaattagttgacgaagaaatatctaaaagattagccactatttttgacaaacatttatcccaatcaacttttaaaatgtggtccatattttcatggtggctatctggtcattttgatattagaagaacccctaaaattctttcacttatctgtgattttgaagttcatagagattacaaaggttcaccatttggtttgatgtgtcgtttatcatttttgaagagttatattggttccgtaacaaatagattccacgattttgatcatataactcataagctgtttaaaattttaggtcatccatatgatataatttcttctgaggtttcagctattttatttgatattctacatagtcaaactgttgattatattgatagctttgaagaatacatgagaagaattcacgaagacaaaacaggaatgggatcaattacgagaaaacaaaatgttttatttcatgaacactttaaacactttttattgaaaacaatcactttggctaaagataacgaaggaaaattaccacaagatgttgttgagtctgaatttatgttccatatcaagggtgcaaatggattattattaagaattttgaggactactatcaatgttgaaattgttgattatattcgtcaatatattttacctcttgtttcacaattagataaagttaaggaagcttgtaacttatcaaatattagtattgatacctttttccttgttctgggtagtattagatttgaagaacaagataatgatacaattattgaattattagaaagcaatatgggatggtcatcaccaaatcttactcaatataaacactcattagcattttttggtgtatatggtactgttagctttttggaaagaactccagcacaacgtaaaaagctgatggaaattacatgctctatgttatttaatgaacatctgtacttaagagaacaatatagtcaaaatatcaaattgtttgttcatttattcctggattcagaacgtgaagagatgattaagttttgtatcaaaaagtttaagagaattattaaaaagaataagaataataaaaatgttaaattaacagttgaacaaaataatcttgttcatggtgcaacattaggtctttgtgcattagttgaaacatatccatacacaactccaccacctgaatggttacctgaagttttaacaattcttgaagtcaaatgtaccgggtatagtggagctattggtagagctgcaaaggatgccttgagtcaatttaagaagacaagacaagatacatggcatattgattctaaatttttcaccgaagaacaattagaagatttagaaggtgtgttatataaatcttactatttgtaattacaattttgtatttcttaaaacatggtttaatttatttttatagtagtttttctcccaaggaataataagttttgaatttttatacagttgtatataaagtacactaaagtatttaaatgatatcaaaacgatagaccttctaaagttttagataattttgcagcgccatcagaagatgatgttaaagattctcctataatcattttcggtctatttgcctctaaaccttgtaataggatacaagctttacaaattttattcatagataaataaccacaacgttcacaacgattaccatctttaacaatcgatactgaaccatcaggtcttatttcaatttctttatctgtgttattattattattattggtattttgtggtatatttttctttggagtatttgtacgtattcttttaggttttaatttaaaatgaccaccactatgaataatatctataatacaagaaggtctaacagattctaaatttttcaataaaactctagcggtacctctaaaagcttcaggtgcataagtacattcagtactaaaataatcaagttttttataatgagcatataagacaatttccttttgataagtatatttaaaaggttttgaacgtttaactggtgaaccaattgaattagttgtaacattaactgaactttcaattctagccgcatcacctcttaaaaggttcattaaaacagtttcagccatatcatcagcattatgacctgtaacaacatgatgaatatctaattttattgcacctctatccaatgcttgtcttcttaaaacaccacaataagtacaacttgatttaacaccagtacaagagacaatttcatccattgtccaattatataaatctttataagaaacaatttctaatggcatttgatattgttgttgatttcttttaacagttgctaaactatcatctctataaccaacaataccttcatcaactgataataaaactaaatttaaaccataattatatctttcatttaaagttttcataatagatgctaaaactgttgaatctttaccaccagatgcaccaatagctattgtttcacccttatagaaaagtttttcctttataattgttaaatgaatttcagtttcaaatacatgatagaaacattctttacaaagtttttgtaagtttttaggtcttttcatgacagctttcctgcaatgacataattggcatagttgccccactttaacttccttctttctaatagtattttccattgaatactgtctaaatgatgaacaatcaagtgctccaatctactcttcagaaaaagaaattaacaagaaataattttttttccaaatcccggagaaagtgaaaaattagaaaaattgagaaataaaaaaagtcattacgtaatacgtagtagaagattttgacgagcccccttttcttttgattacgtgtcccattaacaattgatgagttttcgatgaatggagttaagattgtatataattgttaatgttatttcattttctttttttttaattttggatttattcttggatttatatcagttttctattgttctcgttcagacaattgttaacagtaatgcattttgtagctttatggtctttactttgtctatctgttgcttgggcaagtaatataattattgctaatgataaaaattttgatgatattgttttaaattctgataaaacttcatttgttaaattttcagctgaatggtgttcccactgtaaaaaaatggcccctgaatgggaaaaattagcagattcttatgttgatgttgaagatattcaaattgttgaaattgatgcagataaatcaagaagtattggtaaaagatataatattgcttcattcccaacaattaaattattcagagctgattcattaagtgatccaattgattattcaggtcaaagagaatttgaatttttttcaaattatttacttaatcaaattggtattaagggtaaaaaagttggtaaaccttcaaaagttgttcaaattcatgatggtaatattgaaaaattaattgaaaataaggaaagagctgctttaattgttttcactaaagaaaataattgtgatgattgtatatctgttaaaaaaatgtttgatcaagtatctcatgctttccataaagaattagataaaattattattgctgaagctcaaaaaaatggtgatgaaccaactgattggattagagatatgtattcaattaatgaattcccaactattgtttatgttgaaactggtgattcatctaaatttgaaatttattcaggttctttaacaagttctgatttaattcaattcatcaataataaaattggtacaaagagagctgctaatggtttattagataataaagcaggtattatacctgatatggaagaatcattgaagaaatttattggtattaatattgttgatagaagagaatatgttcaaacttttattgaaaatttgaaaaaagttgatgatcacgttttcaaaaatgaagttaaatattatgcattaattgttaatcaatttattgcaggtaataatggttatgttgatgcagaacttgcaaaatttgatgatatgctaaaaaataaagcaattgatatatcaacaaaggatttagttaatatgaaagttaatttattaaatcatattaaaactttagttactgaagaaacttatagagatgctaaagatgttatggaagaaaaggaaaaagctgcagctgctctttccaaagatgaattatagtctaaattttagtatagtctccattagtatgttataacatttgtattgaattttttttatagaataatatacacttttcactttatttaatattaaattatataatagtatcctctattcttactaccatttaatggcatcaaattttgaacatgctctaatattatttgggtatactttatgatttaacacagtttcattaattataaaattaacatttaatggagtacatcttgcaaaccatacgaattcaccatgtttattataaatcaaaacattagctgcaaatttatgaccacccacatgattaacaaataaaacactgacacctccatctctatcatcacttgcatctctaaataaatcaagatcctttaattgcgattcaaattcttttttcataattggtgcagttataccacatttcttatcccttgtcttatgtgaacataaaaaaattattgattgattaatatctttaaaaacttctaatccttcaacattggataaaacttcaattaattcttctccttctttacctttgatactttcatcttctttgcttttttcaaatacattttcaattccttcaaatactgtatcaatattatcttttgttatcccacgaatccttacaaaccatggttgtactaacacattaagtttattcaaacttaaacattcaggatccataaaatctaatggttcattagttacattacatgcagcaataatggaatatttattactaatttttgaagctttaccactaattaattttaagattgtaccagattcctcaaaggcatcatgttcccaatctgttttaccagttgcaactaaaaagtgtaaatttgctggtctagctgtctcatataatggtgcatttgcagcatctccacgtaaatcaaaacatgattctttatatttattttgacattcacttgaattacatgaaaattccttttctgaaatttctaaaatatcacctatcttttcagcacttttatcaccaataactatattcttcaaagtctttaaatagttcattttgtaagattctatttgtctattccaccaaacactaaaataaattttctaatcgaaaaataaatatcacacgtcaaaaagttgaattcgtcagcgattgattagcccttttataaaattcaacaataaagataaaaaatttaaatttaaatttcttcaatgaggttaattgccgaactgttatctccggaaaggatctttctttacagtaaatccggtttattatcttattatcttgtttatctttgtggcgcatatcattaaaaactataaaaaaacccaaaatacgtatacaataaaaattaaaatgcaaaacagtaaagaaatacactaatcatttgaaataacactcagactttcatcgtcagatgtttcctcacctgaaatataaacataatcattctcaatttcggtttgtgttggtgcttcaggaaataccatagtagaagacattacatcagtagtagacagttgtatcttatctaaatcatcaaataaatgattagaaagtttataatcttgagaatcataattaacaaatgctgatttaaaatctacttcattaagagaccaatctgtaaatctagtaacataaatattatcaaaatgatttttcaactcattggtatgtgatttgttttcagaatcaaaaatacttaaaagtaacttctcatttgactttaaatcaattaatgacttaactttaatttcaagctcgttggcgtcgaaatcaatcatataacaactaattagttgaaatggtgacttttcaacatcatttgaactttcattatcttcttgacctccttcttgacctccttcttgacctccttcttgacctccttcttgacctccttcctgacctccttcttgacctccttcttcgcctatttctttatctttttcttcacctttttcttcacctttttcttcacctttttcttcacctttttcttcacctttttcttcacctttttcttcacctttttcttcacctttttcttcacctttttcttcacctttttcttcacctttttcttcatcaatgatgacatcttgttctttaacagtctctttaactttttccttaacattatcaagatcttcagattgttcatcatgctctacgatcttttcttcaacatcttctggcacttcttctgttccatctttaataatttttacaaaagaaccatgtaataagttagatgtcactttctctgtccagtttggtctatacaaaaattcttgaccattatatgcaacatttaaataaaatgtatcaaattcattaatacaatttgtgtaatctttaaagcgaattaaagcatcacatgaatcaaaatgaaacagtttctcaataggttttctgtctgttgtgaaagagatatacactgaaacatcaaatgatttgagatttccattgaatcttatagtcaagtcttcatcatctctgatacttgcataaactctgtcaaactccctctcattctgatgaatttttgaatctttataagggtttctaataacatcattaatattcatcgtctctggtactcctgaaaaagtgaatccctctttgttaacaaaaccacttctatctgaattatcaaagctaaaatttttcttttcgtactgtgttttgtttccccaataaccagtaacttttatatcatcatcagaaattctttctttttgattatctttgttgaaaattccaaaactaaatgctttggtttctgattttgctgtagtattattatctttaacatttgaattatctttaaatggtgagttcattgcaagatttttttctgaaagtagcctatcaaatatactaggttttgcatttgcatttttatccctggatgaccaagtaccgaaaggttttgatttatcatctttatccatatcactaccgagtttagtctcagctttcaatgattcattattaaatggactgtacttcgctgtttcatctttattattcagtggccaagtgccaaaagttcttggtttatcttcttcaccttttctagtctcagtattaaatgctttggtatcaaaatttccacttatagatgaccaagtaccaaaatttttcacactttccttcttttcgccattatcagtatcgtttttccatccagaaccaaaatcaaatcgtttaaaatttgtatctttttccttggtatcattcttccatttaaaacctaaactaaattgattgacatcagtatcttttttctcccatgcttcagactgaattgggatttttgttgttattaataaaggatcttcgttattacaaattctcaaaacttgatgagaagaggcatgtttatttgaaacaattttctctgaatcacaagattcacataaatcataatcaaaacattgaacacaatgatatctataaccaataattttaccatcacaaccatcacataatatattagtgtgtaaggttttaatttccgaatttggagtatcagatgataaaaaattcattaaattagctttaatagaattcattttttcacttaatggttccattgagacttgatctttaaattcattgaaatttgaggatatatcagataatttattatcaaaagtgagatttaatggttcgatatatgattgaatagctttcagtaagaaatccacttgatcgtttacattatcatatgatgatgtagcttcagcgagatagtcaacaaatggaatacttgaagtatttggtataactaaaggatatttgaaaagaatagattcactttgattaattttaccattaccttcgacttcaacatcaacatccagtttgtttgaatcatctgaagccttttcattattaatattattattatcaatatcattattattatcattaccacttttaaaataaaaattttttaatttatcaacaagtaaatcttcaatttcctcgacatttttcaatttagcaacagttgaagatttaacaaatactaaaactaaagaaattctattcttagcacttaattttgaattaaatgattggaaatgattttctttattaagtaaataaaaactttctttacgatttgattttctgaagaggaaagcatttaattttttcgaattaagataatgcagtatatttctaattgaaatattactcatatcatccttatataatttagtaaagaatctaacaatttgagcaaaaaatttattgaaattgagttttttcaaatcttctctaaattttttaaaggtaacatttgttgcaccaattgaagtacctctaagtaaagttgatgggaaaacatctaaatcaattataacatcatcctttaattttgataaaatagtagaaccagtagtatcaacttctgaattttcacttgatttaaacactaactctggcattgtctatgtttaaaagcaaaaagaatatatcaatcaaataaaatcaggggtgatcagggataataataaattatattaattaaggctcatctcagggcaaaaaacctttaatttttactcactatcgcatgatttgaagttaaattggggtaattggggtaatttaaattaattgcctctttgacagtcctatcgactgcactttattttagaaaagagtgaaaatttttttgtaaattaattacattacctaatatagtatacatgttgcctaaataggaataaatgtcgctaattttataaatttcataacatttatgacgtatttaatttaatttagtatgtttacatggttgctattttaatctttcaattaatttttgataattccgatattttgcatttctattttcaactatctttcaattttatttcttatttaatgctttttagactagtcatttctattttacctgctcattatctgcctttctttcctttttatccttcaatacctccttttattcataatttcttttcttccccgtttcttttaaatatttcctgatctgccctttattccttcttttcaaattttttatgttctttgtgtaaatatattataaatttattataaatttatttttaatctcttatttcatctaacaaataacaaatatagagatgaaatgctcaaaaactcatataactacaacacttttaacttcatttgcattattaacaaatgcaattgatttagaaattggtaataaagattctgtttgtaatgcagcaactgatattacaaatggtataatggattattatttaggtattagagaaaatggtacaattggtatgtttcaacaaccttattattggtgggaatcgggtttagtatttggtggtatgattgatacttggaaattttgtaataatgatacttatgtttcaattattcaagatgcgattaatgctcaaaaaggtccaaataatgattttactgacgttacaaatcaatctcatgttgaagcaaatgatgatcaattattttggggttttacagttatggaagcagctgaaagagatttcccaaataataatgataatgatccttcttatgctcaaatggctttagatgtctataattcaatggctccaagatgggattctgataattgtggtggtggtttaagatggcaaattttaagtaatatgtctggttgggattataaatcaacaattgcaacttctggtgtttatgcattagctggtagattagctagatatactaataatgatgattttattaaatctgcagatagaattttaagatggatgaaacaatcaatgtttgtttatcaaaaggatgatcaagatttttatacagttaatgatggtgcagaaattgaaaatggtagttgtgctgttgttaatggtgcagtctggtcttataattttgcaacaatgattatgggtactgcttatttatataatacaactaatggtgattctaaatggggtaatgaattagacaaatttattggtggtgttgaacattatatgctgaatacaactggtaataatgttttgtttgaatatcaatgtgatcagtggaatagatgtaataatgatcaaagagcttttagagcaattgtggctagagttttaggtaatgttgttcaattagctccaaatactggttatgcttcaagagcaatgaaaattattaatgattctgctgaaggtgcagctcaagcttgttctggtggtactgatggtaaaacttgtggtattaattggggtgttaatggttgggatggtatgtatggtttaggtgaacaaattgctgctttagaaattattcaaaatactcttattgaacaagttccagcaccatgtactgaagatacttgtggtgaagatgttgatgatgataatatttcaactattcctgttccaacaagtacaagagttttcactgatgttcacactagaactcatgttgaaactgttacaatttcaacaattgatgaagttttctatacaggaaattaatcatataaagtaattatcaatcactctacatataccatataatatttttacagcattcacagaaaaaaaagaaaaaatatcattaataactttcttaaaacattgacatcttatatttctaacgtttcaatctctttctatactagtttacttctataccttttatttttacttttttatctaaaaacttatgcatttatatcatgtaaatttataaattttgtcaatattattattattttatttaattatcttgtaaacaaagccccgatcaactccacaaaaacgtgtagtacacatatacgccttattcatcagcatcaagtgatgacataataatttttcagaccctcagtttttatgatttgctaaaattagattctctcgatgctgcactgtgcataatgtttattttcattttcattgctgtttaaactctgttgtttttcttcctctgttgactcaaagttcatttacttgatctagtcttatttgtttctattttacatttgaataattattgattaatgaaacgatcgaatgaacatttaaatatgaaatcaatttttacaattataataactttgtttgtatctttgacaaattgtctggatttagaagttggagataaagattcagtttgtgatgccgcaactttattaattgagggtattatggattattatgaaggtataagacctggtggtactgttggtatgtttcaagcaccatattattggtgggaagctggggaaatttttggtggtatgattgatacatgggcatggtgtaataatgatacctatgaacaaataatttatgatgcattaatgcatcaaaaaggttctcaaaataattatattcctgcaaatcaatcaacaactgaaggtaatgatgatcaagcattttggggtttagcagttatagaagcaactgaaagaaattttacaaatcccccaagtgatgaacctggttggttagctttaactcaagctgtctataatacaatgttatcaagatgggatacagcaaattgtggtggtggtttgagatggcaaattttccaatttaattctggttatgattataaaaatacaatttcaaattccgctttgtttgctatagccgctagattagctagatatacacaaaatgaaacttatgttgaaactgctgaaatggtttgggattggttggttgatgttaaatttatccaagatagttcaaatggttatgctatttatgatggtgcaaatattggtacaaataattgttcaactatacatacacaaacttggagttataattatgctttattattatcaggttcagcatatatttataattttacaggtaatgatacctggcttgatagattttctgatgtttatacaggtatcgaatcaacttttgtcaactcgtcaacaggtattatttatgaagcaatgtgtcaagaaagtggtaaatgtaataatgatcaacgttcattcaaatctattttttcaagaagtttaggtcaaagtgctcaattgatttcttcttataccgatagaattatggatctgattaatacatctgctaaaggtgcagctgaatcatgttctggtggtagtgatggtcatacttgtggtatcaattggagttatggttcctgggatggattggtatggtttaggtgaacaaatttctgcattagaaattatgcaaaatactttagtaatgcaaaattctccacccttaactaattcaactggtggtacatcaaccggtgatgttaatgctggtttaacatcacgtgaaacttctaataaaaatttaattacagttacttcaaaggataaagcaggtgctggtgttttaactgcagttgttttaataatttttgttggtattagtggttggactataatttagttgtatttatatgcattttgtatgatatgtacttgttctgctgtattttattttgatttatgttttttgtttgttttatcactctctctttatagttacaaatctttactatacaattttttaaaaaaaatgatgatataaataacctagaaattaaaaatcgggatgatagataaatactacagtattttattattcaggtttttcgatcaagtatgctaaagctgaaacgccaacaagatcagccaatttaatttttttactatacagatcttctggacgatccattgagtaaccacttatatacttatcgacatcctcttctcccagatcaattattgattcaatggctgtaataggaggtaaactttcatctggtccttctctgtatataaatggaactttttcaaatggtatcctcttgactcctattgggaccgcaactaaaggagttgaatcacctttgagttcctttgcaagatccgctaattctaaaattagtgcattatctccattttgatacttttcaattaaagtatctataagttcatttgtttcttgaaccatttcatttcttgtaaaaatggtttctttagtttcttccattttagatgagtaaagtttagaatcgctcattaatgatgctaaaggcttgataacagcattatccattccaataatttttttaatttgctccttaaccttctgaattgtcattgttgttcagtgtctttaaaagaagcaagataaaagtggacagagcctccggatatcgactggtttaactccctcgaataatttagatggctcagctgttatttttcaattggttctaatttttgtaatagtaatgattctggttgatgatatgatggtgtccaataacaacaccagataactaactgtatcaagcgggtattatgatctcaacggcacatttaaatgacactttgatatggttatcaaatcacctttcttaactaaaccatcttcttcaccatcttcttctttttttcttcttctttgacttatcatgaaatttagtcttacaagtttctgaacaaaaccataatcctgttggctcattggtcaatccaacacatttgaaatgaaaccattcgtgtggacatttatcatattcacatgccaccattctaccaaatgatggaccattacagaaacaatatctttcttcaactttattttcaacaactggttgtacaacttcaaccggtggttgtggcggtggtggtggtacctcaactatctcttctttttgtactttctttaccaccatttcagattttgttgttgttgatttcacattcttctcaattttgacaactttatttagtttaactacaggctttttatgcttcaattgagtttttatattagttgttggattctttgtattttgtttcttcaaagtgatttttattttcaaattcgattgattattcatatcattgaaggaatcattaaaatattcttctctgggtttgcttttctgttttctatgaacttcttcttatattctctccaatcattccaacgactttcaactgcttcacttgtccacccaggtagcttatcacttaataatttgtttaaaacacgatcatcattaagtatatcaagatggttttcaacaattgaaactaaatgtttggattcgcagtcggattctaattgatatttcaacataagttgctttgttctgttaacttcctttatattaagaggagtttgtttaagtaaatgtgatatcttagcttctaatctagttgttttcaagttcatcatttgaactaaccataaacttctaataatatcacatggtaaatgatctaatgtagagactaagttattattacccgatcgtataaactcaacaatctcatctgatacttgaagaggtacagtgggttccaacattgtatcttttgttgtctgaagatgttgttacttcaatttaaaataaacctacataaatctgaaaaatcatgtagataaaaacctcgcttacgttattaattctttgcaatgtttttcagtactactattactactactaattctacggacaattaataataagatataatatattaattaattaatgataataataaatataaatgcatttagtaaatatcatagatatttgaagcatcattataagaagaagaatgagtatgaaattggactttaaaaaaataaattttttcaatgaacaattataaatctaaacaaggtaaaagacaaagtttaaatggtttaaagaatttttcattaaagataacaagaatatatgatgattcgtttcaagaatgtaatgtataattgtaatgtttttttttataataatttaatttaataataataataaataagcgtagaaactaaaaggtattaacaaattttaacaatcaactttatttctttggtggatggtaaacaatctttctgtgtttgatggtagtccacttgaatttcttaacataaacagaaacgaagtataatgcagtaacaacaataagagcctttgcacccaatctctttctttcatcatgttcaggttcagaagtccagtttaagaaagttgaaacatctttagccatttgagaagttgtagcaggagtaccatcttcatattcaactaaatcatcgaataaaactctacccatggcaattgaaccacctgggaagtaaggattatagttagcacctacaggtaaagtaacaccagcaggaggttcatctggataaccagttaataatgcaaagatataatcagcagcaccgtgtcttgccttaacgataagggataaatcaggtggtaaagcaccttgatttgcagctcttgcagcttgttcatttgcgtaaggacctggaatataatcagctaatttacctggtctcttctttggattaccttcatcatcaggttcatcatcatattcaaattcttctgccattgcctttgcttcagagttagtatgagatacaccaactaaatttctccaagcaattctatcaagtgaatgacatgcagcacaaacttctctataaacttggaaacctcttctaattgatgcatgatcaaaggtatcaaacataccattatgagaccagttgaattcaggtgggtgaagaccatgttctgcagcagtcattgcttgtgcagtttgagaatcttgatataaaatgaaagcagcggttaaaccagttgcagcaactgcagcattgacaatcttcttagtgtttgaagaaacatcagattttgcagctgttgagaatgatctctgtaataataaaaagtagtggatgttagtattctgtatctagtagttgaattgattaaaagtgtcataatagtgaattaattagccaataagagcgcatgaaaaaaaaatcgcgatggaaaatgctgattgaatgattgattgattagtttgaatgaaaagatgttgaaataatgggataagaagggcattaaatgaatgtaatataattgaaaggaaatgtagacatgtaatgtaaattacttgttggtatcacgttgtataaagttgtatcctgtattgtaaaaaaatcgtctgactattttgttttcataaatttattctaaactaacagtaattttcaagaaatatggatgtataatgtaatgttggtacaataatgtagatatataatgattgtattatgaatatagcaattaatttcagtaaaagacacttttaattgattatttactttaatattatatctcataacaaatgaattggaaataaatcaaatgagatatgattaaagagttttggaaaagtataatatacatacagcaccgtgcttaagagcagaaccgaattgggagaacatctttgatgtaggtgaggatactaaaagagaatgaaacaattaaagcagaatccaacagtaaactaaagtaaggtaactattataactgacaaataaaattgttagcaaaaagtgattttccactcactcactgtaagcaaatggaaaaaaatagtgagaaattataaaggttgtatagtgatgctttcatcaatttgatggtctataattgtgtatattggtgattattctctactataatcatatacattggaatccatggtatgtgaaataggtatatacataaaagaaatagtgttaatttctaacaggcacagataataacccatttaaagcgtgtaattactgtgtggtcagctattggaagactcttattggctgaaaatttcaattttttaaattttatcaacattatcgtcgcgtctgtgttggtttgctttgtatccgtacaccatgtggtaacaggagacgcgtaaaaacttattatggtaaaatttcactttttcaaattatacagacaccaaaagttttaatgattcactacggagttaccattggtaatagacatatcacataactaatagaacaacatgggtaatagtgaagaacaagcatatttggatttagtagaaaaaattatagctgaaggagaatttcgtcctgatagaacaggtactggtacttattcattatttgcaccacctcagctccgttttaacttatctaatggtactttcccacttttaactactaagaaagttttcttaaagggtattttacatgaacttctatggtttataaatggttcaacagatgcatctttattaagtgataaaggtgttaaaatttgggatggtaatggatcaagagaatatttagattcattaggtttaactgatagagaagttggtgatttaggtcctgtttatggatttcaatggcgtcattttggtgctcaatataaggattgtcatacagattatacaaatcaaggttatgatcaattagctcaaattatacatactttaaagacaaatccttatgatcgtaggattattttatcagcttggaatccacctgcttttaaagaaatggcattacctccatgtcatgttttctgtcaattttatgttaatttcccgaaaaatgaaaaaccaagattaagttgtcaaatgtatcaacgttcctgtgatatggggttaggtgtaccttttaatattgcttcttatgctttattaacttatatgattgcaatggtagttgatatgcaacctggagattttattcatgttatgggtgatgctcatgtttattcaaatcatgttgatgctttaaaggaacaacttacaagaactcctcgtgatttcccaaaattgaaaatactaagaaatgttacaagtattgatgattttaaattcgaagattttaaagttgaagaatatgatccttatggtccaattaaaatgaaaatggctgtataatgcttagatatcatggtttatatagaaaaattttatagtcaatttaaaataaaattacaattaaaaataaaattagtattaattaatatttacagttataaataatctacaatcacaataacatatcaaatgatgaagttatactatctttcttcctactcccgttaccatatttaccaaacatatccatattttctaaatcaaagattgtctttcctttattattattctcctcatcatcatctattctattaggacgattggtaatattcctcaatatagtattcttactcttcttattaggtttactaaccctattttctttatcttcatcaacatatatcttattacggaacttaccagattctcgcctattaattattggtaaatcataattaactattaatgatcttcgacgactacgacgtctttcacttgtactttcattaacatcatctaatggatccattccaagccatctcttagtcttttcagtatctaaattctttaactctcttggaatactactctttcttctatttttcttgactggtgatgttattggagatggtgtagaagattgtgtttgttccattggtattggataatcgggtatttcgtgaacttctggaacttctgggacttctgggacttctgagacatcatgaacttcgtgaatttcaggaatatcatgagattcctctatcactggattttctttcttattattatcattactattattattattgttattctcctctaacttatcttctagtccaaggtatggaatcatagataaatgatcagttttttccattatttgagaaactctttttattggaattaattcagaacttttatccacatattctggctcaagttccatttcaatctccttaacttcatcatcttgttcaatcaatgtctctaatccaccttcgttggatacatcacttgattcaggtgccttaaaataaatacttttacgtctttttaagtcatcattaacattctcccaataatgatcaaattcatatttctccggatcaaactttctcaatttctcttcctcttttgatgatactctggtaatcaacttcattggaatatctttcttttcaacatcaacacctatttctcctacaaatgaacggaattcttcgatcataccttcaaatttatcaactactatatcattgaatctctttgaattaattttcaacaaatccattaactttatcttatcatttttcagttgcaatacttgcttttgtgattgaaacaattgtttctcaagaccatttacttttaattttaattcttcatttttctgtgctaaaattttattttgaatattatatgtccttttaatttcatctatttcggcatcattatgtgatgagctaactactagctgcatttcatttgcatcattattcatcagtgctctcaccatgattctagcaataatatatattctaatctagcaattacgttgtttactcaaagaaaaaagaataatagtaaaaaagaagataaaaaaagtaaacaataaacttcaagttcgaataaacgcgtttgtaaagtgacgaattgttttttttaacaggcaactcacctctacttcttttttctgctttacatgaccaatgtcacaaagatactccattctgaatgaatacgaagcggaatctttgattcatcagcgtcaggaagaacttcgtagactacaatctattgaatcattgacttcacaactatctaaaaccttattgttattaaatgatcaattatcaaaacttcaaattgggacagactcagtatcacaaataacaggtaattggatacaaattgttagagctgttagtttagctgctaattctatatctaatattgatgctaaggatgaaaatccgttgactgaaaggttggttcgttgtgcattggatgaattagggacaattgtaaaacaattagatgaataaggttggaatttagttttatttccaaaattatatgaatctaataataaatgatataggcagtcaaattgtatgatgcttctaaaaagaggactttatctatttacagctaaattataggtttcatggttcatattctgctgtttagttattcaagttcattataacaaatcatatcaacatgtacacctttgtgttggagagtatttgttgagtatacacaaacgtttaccaaataataagactaaaaatggaaagattaataatatcttgttcattcatagctacacttgattaattaatagctctaaactgtaacagtttatgagtccaaattgaactgttttttctagtttgactagacgaagtgttttaatttcgactcataacctgttgtagtctagtttattgcttgatctgggtgtaatttatgtattgtttaggtttttataattatttataatattaatacttctatattcaattaaaagctcactttttaacgttcaatgaactataaggaaagatattgaacgttattgaacgttactgtattacacagtattcagttggatttaaaaatttacattttgttttatttattaacaaaaaatacctggtattttcaaaaattttacggtcacgtgacaacaatacaaaaatgtcggaagcaaccacaaaaatatactttcaacaaattccttgttagctcagtcggtagagcgttcggcttttaagaattctttaagaagtcgaccgaaatgtccagggttcgagcccctgataaggagtttaaacaattatttttttaactttctctttttacgtgtttttcactggtttttttactgttactgtcattacacgtttttacttaagactaattgtaatgtatagtatgcattttttttattctaatcagttaatttactaatattaaaaatttaaattagtattaacttattacccataatatttattattataaaattgcccatttgtacaattaggtattttgttagctttaaagtcaaattatttattactttcagaaaagattgttgttttaaaagatcatcaagcattggtcagtatatcaaagaaaaattcaatgctcaaccctagaatactttagaaactttgtcaacttatccgatcgcataatataatgtgcctcctcatcttaataataataaaataggtgttacagctcaatttgggaactacaaattcatgaaactaccattcggtttagctgcttcacctgtggtttatactaactttatgtaatttattttatccaaattgcactatgatgaagaaaatcatttcattcaatgttacattgatgatattattgttgcttctaatgataaagatgctcatgttaaattgttgaccagaattttaaaattattacaagatgatcttagattatctgcaaacaaggttaaatggtgtagaaatgaagttgaattttttaggatatttaatcaaagatggacaaaggtatccagcacccgaaaaggttgaagcaattgacaattgggtcttacctacaaatgcaaatgaatggtcttcgttcatcggttttgtcaatttcctgaatgcattcattccaaattgtgctgaactcttgaaaccttcatacaatcatttgaatttttcaaaatccaatgccaaaaacaaacaaactgaggttaaaagtccaacggaagatgatgttttattacaaaatttcaacaagataaaaaaagcttcattagcttcctgaaggccaatttgattcttgaaaaaaacaaaagcttgtcttagactaggaactctgaatttttttctcgattgtcaccagcaattaacaaatctttcaaataattggtaatcattctatcaacacaaaaacccttctttttggaatgtggaacacaaaacacatacttatttaaacaatcatttgaattatccaaatgagcagcatttttgatatgttttaaactttcatcaaaatcgatttcaacatcattcaaaatatgtgtatgatcattaattgatggatccaaacgcaagtctttcatggcatcatgtttcaattgagataatgctaaaacgaagtgaatgaaatacttcgtaactttatcattaacaataaggacttttttagaataatcagaaacaatatacaaataagccttcccatcatcaggttgatataatttcataacagtaccattattatccatggtaaaataggccttctcaaacaatttgtaactacagaaaaatgcagcatcatcaactgaaggaagaaattcagagaaagtggtacatctgagttgtttctaaaactaaattcaaacaatctgattcagttatatactttagtaccctgtcatttcttatttataacaaatctataaagaaaagtgtgtacaatccaatgtaaaaccattaatcatgcaatccatcacaggaccatttgaaacctcatccacccaacagacgcgacgatctcttgaatgtattttttaaatggctgcataaaaatgaaaaacgaccgctttgctttatcttagcagtgagacattgattaaattgatagtgttaagtttgtagattttacaggttttttttgcactttttctatctagtaaagtaaacttaaagcacatattacaatggtacgtattgaatcttatatattagtttatcaattgataaattaaatattcatttgattttagaattaaaagtcagttttactaacatttttatacttttactcacttttaattactataggcaggtgctatagagaacgcacgtaaatcaattaaaaatcttacaattaatgatgaagatgaatcattatatggtcaaatttattcagtttcaggtccagtcgttattgctgaaaatatgattggttgtgccatgtatgaattagttagagttggtcatggtaatttagttggtgaagttattagaattgatcaagataaagcaactattcaagtttatgaagaaactgctggtgttacagttggtgatccagttttaagaactggtaaaccattatcagttgaattaggtccaggtttaatggaaactatttatgatggtattcaaagacctttaaaggaaattaaagatatgactcaatcaatttatattccaagaggtgttgatactcctgctttatcaagaacaattaaatatgaatttactccaagtagtttccaagtaggtgatcatattaccggtggtgatattttcggtacagttttcgaaaattctttattatctgatcataaaatcttattacctccaagagcaagaggtacaattgtttctattgcaagtgctggctcttatacaattgatgaaccattacttgaagttgaattcgatggtgtcgtttctaaatattcaatgatgcatacttggcctgttagagtcccaagacctgttgcttctaaattatctgcaaattatccattattaactggtcaaagagttttagatgctctttttccatgtgttcaaggtggtacaacttgtattcctggtgctttcggttgtggtaaaactgttatttctcagtctttatccaaatattctaattctgatattattatttatgttggttgtggtgaacgtggtaatgaaatggccgaagttttaatggaattcccagaattatataccgaaataagtggtaaaaaggaaccaattatgaagagaactacattagttgcaaatacttcaaatatgccagtcgctgcaagagaagcttcaatttatactggtattacattagctgaatatttcagagatcaaggtaaacatgtttctatgattgctgattcttcttcaagatgggcagaagctttaagagaaatttcaggtagattgggtgaaatgcctgcagatcaaggtttccctgcttatttaggtgctaaattagcttccttctacgaaagagccggtaaatcagttgctttaggttctcctgatagagaaggttctgtttccattgttgcagctgtttcacctgcaggtggtgatttctcagatcctgttacaacttcaactttaggtattacacaagttttctggggtttagataaaaaattagctcaaagaaagcatttcccatctgttaatacatcaatttcatattcaaaatatacaaatgtcttaaataaattctatgatcaaaattatccagaatttgcaactttaagagataaaattagagaaatcttatcaaatgccgaagaattagaacaagttgttcaattagttggtaaatctgctctttcagactccgataaaattgttttagatgtttcaactttaatcaaggaagatttcttacaacaaaatggttattcaacatatgatgcattctgtccaatttggaaaacttatgatatgatgcgtacgtttgtctcatattacgatgaagctcaaaaagctgttgcaagtggtgctcaatggtctagattagctgaaaatacatccgatgttaaacatgcagtttcatcagctaaattctttgaaccaagtagaggtcaagaagaagttcatggagaatttgataaattattatcaactatctcagatcgtttccaagaagcatctgaataaataattttaattccttaaagaaactcttactctttcattgtatagaattatattacttgatgtatttagctaaaaaaaaataaaaaaaatggttataaaaagatttaaagtaaaatgaatttatgggttaaaataaggttgcgcaggggagcccttcgtagaaaaataatggtcttatggatttcctatgtaaacacgtacttttttcattaaccaaatgaactttttggcaaaaactattggtacattaacaggtactgcaattccatattcatttaatgaaccttgtgttcttccaatttgcgaaaatccaagtagcagatcaatttggaaagtttatgatggtgtttcagataaagattcaacacctgtcaccatttttgaatttgatctgaaaaatccagcaaattataattacattacaaatgctaagaatgcattgaagaaacataaagcattatcattattacccggtgttttgactgtttttgaaactattgaaaatgatagaactctttatttaataacagaacgtgcatcatcattagctgaaattacaactgagatatcaccagcttcagctgttctagcaatttatcaaattacaacaggtttgaagtttataaatgtggaaggttcttgccttcatgggaatttaagggatcataatgttttcattactgattctggtgaatggaaaattggtggatttgaatttgcttttaattatcaagataacgctatagaattccctgcattatacgcatcatatcccgccttaacatttcaaaaaggtatgattatttctccagagtttgaatcttttggatcagattgttttagaactcatctaaaagggggtaaatcattgaaatttgattcttatttacttggtttattatcatatcaaatttctcataatagaagtcctgcctctaatgaagttaagacccagtataataattggagttttgagggtattcctataaataaattactctctccaaacgttggactacgaatgactactgaacagtttttaggtaatggtgaaacatcatattttggaacgccagagattgttgcatattccaaattttcacatatttcaattgtaagtttgacagaaaagttagagatttttaaagcattagcaagtgctgatatctctgcaaaattcttggattttaaagttatgccagaaatcaaaaatgtctttgatatcacaacttcaaatgaaggaaatattcaaacaattttgttatatttgatgtttttgatttataaaaactcaaatgaagaatctaagtcttttgaaatatttttcaaacctactatatttaaggcatttacattatcagacagagcaattcgtacaattttacttaaaattttaccacatgttattgaaaatataactaaatatgaagttcaagataaaatatatccaaatttggttactgggtttttagatactgatcttacaatccgtactgaaacattattatcaatttcatatgtcatggataaaataacagaaagacaattaaacaatgatcttttacgttatttagccaaattacaagttgacccaaattcaaaattaagagctaatactgttgtatgcttaaataaaatttcatccaaaatgcaatcaagtacacgtattggtgttcttatcactgcctttggtaaagcacttaaagatacagattatgtcaccagattatgtgcagttcgtggatttgaatcatcaattgaatattttacaccagaaatatgttgttcaaaagttttatcatcattatcacctgcattattagataaatcatcagttatcagagaagaagcagagaaaacatttgaaatatacatgcaaaaaattagagctgaagcagcaagtattaaacataatgaagaagacgatcatattgaagttgacgtttctcatctaagcaatttaatggattctatttcattagagaatcttggaaactctatattagagacagtttctactctcaatacaccttcaggtacaccattcccagaatctcgtatgaatagtaaaaataacttgactagattacaatcagcatcaacagaaaatgttgttaacaaggcatttggtgtaagtgatgattttgatgattttgatggtgatgatggttgggatgtagatgatgatgaaattgaaaatgctaaaccagtagtttcgaaacaaagcagttttaacaaacctaagtcagcatttggagctactgttcaaaaacaagaaacaaatactattaacaaaccttctacaattaacaagaagtcaatggtattaggcaagaacaaaccagttacgaaaattaacttaaaccttcaacctaaagttgaagaggatgacgatggttggggtgatggttggtaatcatctctataaatcctttttgtacactataagtaaaaaaaataaacattataagaatatattcgtctatgctttatctaattgtaatttatcgttagttccacctaattttttcaatcttaagaaaacatcacatccataaccatcaatagtagccatatccaaagtaccattccaataatctgtataaactttacacattggcattgaaataccaagagtatattcaaagggacgtgaagcaagtgaactaagtgtggaattatctttctcagatcgacttctttccatttcaccaatgtttgctaaaacaccaggtaattcacttggttttaatatctccatttcatttctgtttttgaaatattgatgtgatgtaattggtaatctttcaggtaaatctagatttggtaatgcataaaaattattcaaatgaagttttgcaacttcaggagtcttactaaatgaccaaaccttatccattttttcaaatggcataccacctccttgatcagagaatttaaatgtcatttcatatttagtgttgactatataaacacaaacaggtggtggtttatctgatttcactccaatatttataggatcttgaagtttgatgtattgttcaatagtacgtttcaaagcatttcttaaaatttctgtgaaaatgtagattaaatgatttgtcataaattggaatttaaaatcatctcctataattttcaattctggcatttcgacatttgggtatatactttgtagaaatgtaatgatacttttgtatgatttatttagatgttcatgagctgaacaatattggaatgcttcaccaacatagtctggtggttttacttgatcatcatcaaggttttgtagttttttagaatcttcaaatgttttggacatacaaacatgttgatccataataactcttctactaatccttgaacgcaacatggatgacataaatttatctaaatcttcaggtgacatgttttgtaatacagaaacctctaatgcacccatcataagatgtggtagaacaatataatggtcacttaacatgttttctaaaaactcacaaaaacctttattatcttctaaagattctatcttttcaactttcctaaaagcatcaaaacaatgataataactttgatacacttgactaatatgataattactcgttatttcatatggtaagcattgtaattcccttatttttaaacttaatcttgtagttagttcagttcttacaaagttagcacttgctaatagtttttcattagttatttttttaccaaaattagctaaatgtcgcaatgtaactggatgtgcttcttttttactccaattctccaaggttgaattttgataaaaatgttgttcattaagaatgaaagatccttctctatacggtttgagactttcaattcccttcaccatttctgctactggaattttcttagtgacactcatcgcttacttgttattatactattaaagatatatgtcagagaagtattcaatcggggcccatagagcaatatgtacctactaaacaggaatcatggcattgataaaaatcacaagataatactgagtcatagacgcggcggatataggtcaaccggtaagaggtttcaagggtaatagttacattgatctcatttacaggactgctggttgtgcaaatggcagctacaatatctttcagacatgaccattctagtcaaagaagatacttaaaggaagatattaagttgtttaataactaataaataatgatcacaaaaggcccgatgacaatatcgtctgcaccttcctaattgggtaattttggctgtctgataacaaatttcaatttctttttagtatactttagcaaactttaatacaaatagaaacccatcccccatcccgatttccatcttcagaagaagtatcgttgttgaaaaagtaacaagatgaagtttcaagccaatgtattactcttattagttgcaaatttaaccaatggtcacatattaccacaacaatatttagaacttgttggaacttcggataatacagttattgaagcaaatattccaaacagtttaatggatacagtttttggagatttaattaatactgaatcagtcatacaaacgaaaagtgataaattaggctccggtgaactttcttacaatgaagttgatactttaaaaacaactaactaccattcttattatgaatccaaaaaaataaacttcccagataaggatgatgtatcagatatcgtttcagatactaatttatattcaggtattgtatcatttgcacatcttccaatcaaacaatgttttgaaaacttagatgaagaaatcgatatagctattgttggtgctccattcgattcaggtgtctcatatactcccggtacaagatttggaccaaatggtattagacaaggttcaagaagattatttggtggtatttctccaattagaggtaattctaaagattccaaactttacagattacctatttataatacaggtttaaaacttgttgattgtggtgatgttccaatgattccatttgatgcaagagttgcattggatcaattatatagaggtcaacacgcaattcataaacataaaacttcaagtaattcaacaaattttgatagaactagagttgtcacattaggtggtgatcatactgtcagtttaatgaatatcaaaagtgcatatgaaacatttaatgataataatgatgatggattagcaatcattcattttgattcccatattgatacttgggatccaaaagttttaggtggtggtataactgaatatgcaagtttaaatcatggtacatttttacattatgctgctgaggcaggatatgtttcacataaccattcagttcatgtcggtattagagcaccatatattagtgattatgacgaaaaacatgataaagaatgtggttttcaaactataacatcaaaagatgttgatactttaacaccaagaggagttggtagaaaaattaaagaaattgtaggtgatcgtcctgtttatttaacatttgatttagatacatttgatgctggaatgattaattcaggtactttagaggcaggtggattaaattcaagagaaattatgactatattagatgaacttgaaggtattaaattagttggttgtgatattgttgaagtgagcacaccaccaaattcaattggtaatgatgtaactggtttacttgcggcacaagttattgatgaattaattggtttaatggtagtttctgagctttgatttttataatgtattttttatttatattttaaatggttttatttaatgtctatcttctgtatatagtttagtttcatatatttatcataaccaatagaagaattaatcacaacatgatgaggacttacaatagcatcaagttttgctactgttagtgctgttaaatgattcatataagcaagtaaacagtggatgtttaaagttttactaacaaatttgccttaaaaacctctgctcagatgcgcattatataatgaaaaacccattattatgagaaaatttcatattaatggtgtgagaaaataattagttttccactgtatgagatacgatttctatgtgaacttggcaattttatgcgtttttaactctctaacaagttttactaaatgattatgtaaaatgatattttcttcagatccgttgttggagtaatcgtttcaactagtttcttttggaaactgtccattgagaacataaatgaatggtgtaattagtatatcatccttgttatcagaatcagattcaagtgatcggaaagaacctttgaaaaatgatcaaattcttactcaaaatgggaatcttttagatgttaaatcaattcaatcaaatcaaatgaacaaatcagtaagtccaatgtcggtttctaatctgataaatgattcaacttcaaaagaggcgacacccctttctgaatcaaatggaacaaatacagagaaaaatggtgctaaagtgatgaaaaagaaaccttcgtcaactataaataatgaacacacagaaacaaacgccaataagagtaaaaaaaataaaactaatgaaccaatgattattaatattgaaataccattatcaacacataatgatgttcatcatgaatttaatttcgttaaactggtggaagaaaagtatggaagatacgatacaacgagtaatgttccacttgctcgtagttcttggaatgaagatgaaggtgacgatgaagacgatgaagatgaagatgaggaacaagaggagcaggaagaacaggaacaagaacatgaacaagaacatgaacaagaagtcgaagatgtgcctgaagtagaggacgaagtatctgaaatcgaaccttcaacgaacaacactgtagaaacaacagtggatagctattatgatgatgaagatgagatagtcaaagcattgaagattaaatttactccaggaatgagtgatgcagaaaaggaatcattggttttaaaggaaattcatcgtcgaaaaatggttaataataaacgtattggtaaatatgacgttgatgatccattcattgatgatgaagaattagaatatgaggaagatactaactctaatgtagatggatggtttatttggtatggtaagttagacactacacaacagaaaaagaaaccagtaccagttgtcaaaacagagaaaaatggaagaactactaatagtagtcgtgctagaccaactgctaataatggatcaacacagaagagacaaagagaatctaccaatactccacaaccacaaaagaagctaaagaaacaagctactcctattaagtctgtttctagtacatctacaaattctaattctaccaaaaatacagatattgctataaccaagactccaactaaaaccactactgattctaaggccaataccaaaccagactcttccaaaccagaagagcccgttactaaagagaataaagatgccaaagaaaagaaagagaaaaaagaagataaaccatcatcaaacatcatcattggatctttcgggttttaaagtgcgctgctccttgccaaaaattcatgttgaagttttttaaaatttttcaagatacaaaaatactgaagattttaattgttcttttctggtcaagtaactatgaagtgtcatagctctatattaccgttagccacattaactgttttggctacaacattagttgttgaatcatttcataaatattatcttaaagatggaacaaatacatttttagattacatacgaaacttaatagtatcagattcaaaagataagaaagacattccagaatcactcagaattggatctaaacataactcctccaagtcaggtttagttaaaacatcagaaaatacaattgttcacttaccacaaccatattctgaacatttaattttagaacaattaactagaaattattcattcttatcagaggaaggtatgaaaaaaattagatcattaagaatcgttgttgttggtgcaggtggtgttggttcaaatgctattgtcgcattagcaagatcaggtgtttcacatttacgtatagttgattttgatcaagtttcattatcatcattaaatagacatgcatgtgcaacactgaaagatgttggacgtagtaaagttgatgttttagttgatttcattggacaaattgcaccatggagtcaagttgaaggtattaatgaattgtttagtattgagaaatcagagagattattattaacaatggaagataatattaaaccagattatattattgattgtattgataatattgaaacaaagattgaattattaacatattgttatcaaaatgaattacctgttatatcatcaatgggagctgcatgtaaatcagatgcaactagaattaatattggtgatataagtgtttcagatgaagatccattagcacgtgttgttcgtcgtagtttaaagaaaattggtattaataaaggtattacaacaattttcagtgcagagaaaccagatccaagaaaggcaaatttattaccattagatgatgcagaatttgaaaagggtaaagttgaagaattaagtgctctacaaaatttccgtgttagaattttaccagttttaggtacaatgccaggtatgtttggattagcaattgcaactagaattgtaactgaagcaggtgggtatccaattgaaccagttgaaggtaaaaatagatataaagtttatgattcattatttcaaagtttagcaggtcaacaatcaagattaggatatgaacaacgtacaccatgggttaatttaagtgatactcaatatattttagaagaagtttggagaggtaagagtccaattagtggatattctacaagattaacattgagtcgttggttcccaggagttgaattaagtacacaaaatgttgttgtattaacaaaggaagaacaaaaggaacatgaaaagagagttttattaggtggtgaaaaaatagaggatgtttattcaccagaagttcttgaaagaattgcatatagatttaaagaagaagagtattattcaaaatttagataattttatgaatgtatacaacgtttgatatatagtaatagtaaaagtctatttacaagtaattaacattttgttttataatttctttgaagcagtttttttaacaacttcagcaacttgagaagcagctaatttaccaactttaaaaccctttgattgtaaatacttaacaactgcaggtgtaattgcagcagttattggtaaacgaataaatataagcgatttatgaattgcataagctaatgcaaattcagtaactaaagttgaagatttttcttcagtttcagtatcacttttagttgtactagcatcaatattaacattttcaatttctttcttatatcctataaatttcataaatttatcttgatattctctaataacatcttcaccagcagaatgaacaactaagaaacaaattggtaaatcaattaatgataaacctaaataaatacctaaagctgaataaccatattgatgaattaatttcttaataccagttggaggttttggtggctgtgcatgtttaatagttgttgattggaaacgtaaacctaaattacggaaaaatgtacgtgaatgtatttgagatggtgattttaatggtatacctaaaggtaatttattgaagatattcttaaacattgtaattgattgttaaatgaagggtagtgtatggaattctgtctttatatacgatacgagagggtcttttataatttaacttactaattttctcgttttcatgaaattttgaggatttcggaaataagtggatggtattatgttatatcggaaataagataataaattaaagataatcattaaatattttataaaaaactagtttttaaatgaccagcaccattaggaaaggaagataagatattgcataagaaaagaaaaagaaaagaataagtagaaaggagcaaattaatctataaatgggaataaagactttataatttagcctttggtactctaccaacagtacatttaattaaaccatttggatttggtgatgggtaaaataagacattatcattatcaagacctttccaagataaatcaaataagatataatgtttatttggtaaagaatatgaaacattttcaacatatggtgaaatatctaaaatatctgaacacatattgtacattgttgcttgaactgaagctgaattttctaatgcaaatctatctaatgtaacttttaaaacatttaaagcagttttatcgaaaacaccttgatcagctaatttataaatatttttaattgaaccaattttcttttgatcaaatttccaagtacaatcaatatcagttgataaaattctatcactggttggttttaaagttgtataatcacattgatggaaatcaacaaaacctgaaccagttgattttaaaacagttaaatcttttaaagttgaagataaagtgaaatcaccattttgcttgtagtttaattcagtaattttaacatcttcaccatcctttttaaaggaatgatcatgtaatttaccattaacttcatatttagtccatttatgttgagtaattaaaacattacaaccactaacatgagaatatttattaacaaaatgttcagctaaatgagctgcaaatctttcaattggccaaacatcagtttttctagcttcaactaaaattgtatttttaacagtatcagttggaacaacaggtgaattatccgcctttgtatatgatacatcaaaattaccagttaataaaactctaacagttgcttctaaaacttcttgcttttgaggattatatttatcctttttaactttaaggaaattaacgttatctttaccgtaagttgaatcttgtaaataagccattgtgtgttatgtgtgtatatgtgttttgatacttaaaagaaaataaaaaatattaaagtaaagaagaaataaatcaatcaagaaatcagaaaactaggggaaactcttatccttttataatcacagaataatcaaccgggtcgaaaaactaacaaaacgtgtatatttagataagatctacaaataaattaagataatgtttacatttcttatcataaacctgtcaaatacacgtcccataattaaatcataccattaatatttacagctatcgctctaccgttgtattgtcaattcccttccctgtaatacactctatgaaacatgttaaacctcatcaaaagtatcgtaaaatcagttaaaaaatgtcaaaaaaattaatttgctcggtcatctccgaaaaattccactacaaatcggaatgccggtcgtttttctgttcttttgttattatctctattattttcattattttcattatattcattacatgatacattttatactcataatatttacacatactcttctttactttcaaggaatatccttaaatgaaataaaacatcacttaagtgtttaaaattgacaaatttataattcttatcataaataaatccaaataagaatccacccattttaagaaatttaaatggtaatttaaatccaactaattcactcataattaaatcatgatcatgtaaaacatttaaatcatctgaaactatcttatttaatgtttcttcttcttgtttatatttattctcatgttccttaattacttcatcaatgcttgtagcatcaccaacttttttacctaatttatttaatgcctcaattgcttgtcctgtctcaaaatcttcataattataattatgtttcagaaattgttctaagtttaaaaatatcttgaaaaatttcaaataatatttaaataataccttatcaaatttattcaatgcttcttcaacttcttcattatttaaattattataattataatgatgattattaatacttgaattaacaaataatgtagaatttaattcaaaatgttgtaaatatatgaaatttgataaattattaaatctcatcctaattttgaaaaagttctcataattacttaaaaatttaacaataattaaaataacatcaaataatatttgtgaatcaatactcaatttatgtaatatatttaaattaatcttattcaaattggtaaatgatttatttatattgctgtttttattattcttatcatcctttgaatcatcaattggtggtggagttgaatagatcttatctaaggatttcataactttattatttaactcaaaacttggtgaaattgtaccaattaatgaattatcttcattaaagaaaaccaattttaatatatcaatggaattttcaattaattgaatcaattctttttgaaaatcttcattttttaattcatcatcaccataattaaaacattcaaaatattgttcattaatttcagtgaatgattttaaccaaacactttccttaatcttatttaaactaacaattgaactcagttttaaattaagataatgatttaatatattacaatcgttataaacttcacttgtcttattgtataaaacacatgctttaaccattaaattccaaacattaccaattttatgaattttctcaatagtgattaatttactattaccattaccaatttcaattaaaacattctcaattattttattatgattaccaatattatattcatcatcatctgaatcatcaatctcaccagcattacttttatttttaattttatctttatcatttttattcaattgtttgaaataaactaattgatgtaatgcattttgtaaacaaattaatccaaattcactaacatgattatctaaaagaaaatttctattattaattaatccagttttagaatcaattttttcaacattaagtttaattatttctttgataacatgtttataactaactgatgtaaattcaaaattttcaattaatcttttatattcttcttcattaacacaatcccataataatgttgcatttggtaaattaatatttaaatcacttataattaatgatgggaaaatattatataatgttgaaagtaatgttgaaacatggaaaatcatatgaattgtcctaattgttgattcataatcaagaaatattttaaaatcttcattaatattatcaggtacttgaatctcattaatttgtgatgatttaatcattgcatttaatgcatgaacttgtcttataataactgataatgtaatttcttcatcagcaaataatccataaattatacttaatgttaaactttgaattaaccataatggtgaaactgtactgtttgaattattattattattattaccaacagtttttaaatttttcctgctatctaaataaacatgaatacatcttcttgaaatttcatataaatttgatgcatcttcctttttatttgaaacaactgctccaattgttgttataagcaaaggtaaacaaataattgaaacttggaaattattcaaaaaattttcatctctaatatatttaatttcatcccctttataattagttgaatcttcaacacttatactatttgacattattgaattaattgcattttcaattatccaatattcatttaaaatacttttatgaataaatggatgatgagttaaaaatttaaaaatgaattgatcaacataataatttaatacatcaacaggtaatatatcaggtgttggagtaccaaagaacggatattcagataacgcatttttaataaatttaatcatataattggtaaataaatatgaatgggaataagatttagaattattttcattaaattctttttcaaatgatttttcataatattcttgaatatgattattatgattatgattattattgataattttttcagaggaatcattatactcatcaatatccatttcatttgatggtgaaggttccagaagtattggtgatatagtggcttcagtatcaacagttggatgattattagtatattcatcattaagattcatattcatattcattgaaaaattaattacagattcatcataaaacgaatatccttgaggtatgccatatttatttgatacatgcatatcattaattttttctaaatctgaaattggttgattaaataaagtttcttgccatgataaaattttactatttaatccattaactgtattatttgataaatttgataaatcattattatcttgaaatttactcaatgtgaaagtttttaaattatttttaagtttattttcatcaatagtttggttattattaatattagtgttatgattattaatattattatcatttgacaatctttcaagttgatgtaaatttaacttatctaaaaagttgattgcattatttgatttattttgcattaatgaattaaaagttttattcagaatttcattttgagcaattggtgaattttttttaaatggactatcacgattatcttttgaatatttatcaataattttacttttgtgagaatttgagcttaaatttgaatttgaacgtattttcgaatttgattttaaaattggatcagacagtcttgttttaaataatgattcagctatattcagtgtatcaatatcataaaatgaataacctgtatcaacaacagggtatgatgatttaaatttagtatttgaacgtgaatttgattgagtattagaagttgatcttacttgagaattagaattagaattgaaatcttcagatgaactattttgtgcttttgttattaatttgctcaattgttgaatttcagtttggaatattggttcattattattattattattattagtatcaatatgcatttcattatgatcacctgcaaaagcgttaagccatttttcttgttcaacttctaaggagagaaattgaggagttgaaaattctacagtttcacttgcataaggttcagggtttgtcaatgcataattaacaccactcattgctgaaaaagatgctcttctaaaataattaagagaatttggttgtagatcattaagttctgggtattgggtatatgtatttttttcattatcattattatattcgttatttttttcgttttcgttatcgttatcattattattatcattatcattattgttttttaatttttcattaatttggattttttcctttttaatagatttaccaaatttatcaagttcattatcaacagttactaaagatgatgaaatatctgatagttcacctgatcctatatgattactacttgataaaggatataataattggaaattattatataaagtttgatttatatcagttgaatattgatcatttgacagtatcagagaattttgatctttatcggagttattattattattaaaagatggaatagttatattagtttgaattgaaggattaaacataaaattagttgagattgaagcatttgtagttgaagataaagatgatatatcagttgaaattgacttattatcggataagattttttgcttctttttacgtttatctttatccttatccttatctttaactttatcttttgatttatccttatttttcaatctatttttaaattcttctaattcctctggagataaattattcaattcatcctttgacatatgtttaattgatcttttccttaatcttggtattatatcggaagcaccggcatgtaatttagttgaatgtcttaataataaatctcttctactaaattttcttgaacatatattacaagtgaaaggtttttcctttgtatgagatctttcatgtctttttaaatgttcttgtcttgagaaagctcttgtacaaatttgacaaacaaataatcttggtttacctgaaggtgttgagccttttacagtatattcttgagttactggacctcttgatgacattttagttttcgattgaattcgtgattcattttctatttcattattattattgttattattattattattatcaatatccatattattattatcaatatccatattattattatcagtgtttatattcatattattaaagttaatatccaattgtaaattgttatcaacttttaaatccataatgaagtaattaatatactaattgattgactatcacatacaaaaggagagattaactatctaatataatagaaattgcccttgcaaataaatgtattggaggctcttcaattgatatataattaaagaaataatttatacctaaaacagaataaaaaatagaaaaataattttaaagctggaatatctcggaagaagggcagcgggggtgtatattattacgtaacgggggattctctctccgctgattggatgatggctatattattattataataataataatgaggggttattattacgtaatatagggaatgacataattaattttattatgacatggtgagatatttcattgatcaactactttttgacatatttttcacttcataggatcaatacagacccattaatgacaacaacttgtacaaatacatctacaaatacatcaacaaatacttctacaaagagaaatttttgtaaaacttgtgataattgcaggaaatctcattataaatgtgattcatctaaaccttcctgttcaagatgtatctctaaaaaattatcttgtcattatagaatttctgaatctggtggttatagacctagacgtaataataataatataaataatactaataataccaaatctatcaataaatctattccatcatcatcatcatcatcatcttatacttcatcttatacttcatcttactcaattacacctacagattcaataactaaaacttcgtcatttaattcaatttccccagattcctcatatgattcaatttcaacttcaagaatattaaataattattattatcatttccataattctcatcctttattacctgataatataaatcttttaacatcttatttagatactttacctattagttattcaaatactttattatctgcaatggattcaatttcattatctcaagttgtttctaaaaattataatgatataactttcatacccactctaattgataaaatatcaaaatttacaaatatttttaaatcaaatttaccaaatttaccttatttacaaactgctttcatttatattttaacagctcattttgctggattaccagaaatttgtatcaaattgaaaaatttagctgctgatcaattggtttcaattaatatatttaatttagattctccaaattcaaattttaccctaaatcatccatttttcaaaccatttattaaatctttaaatatagatataaacctcttattagaattaacaaggaaaatgttttgggaatttcattattttgatattcttataggtacagctgatggtaaaacaatttcaaaactttcatcaccaaataaatcattatcatcatatattaatattaattacccacaaaatgaatcattatttaattataatttaagatcaaattgtactcatttacttaatttatctataagatttaatatttcaatacttaatcatgataatcaagattcaattaatcttaattataatttagtttctgttttaataactaaatgggaaatgattttacttaattattcattattaaattcaaatggtattgttaataattcaattcatcaatcaattttacttttacaatattgtaaaattttcttaaatagacctttctcatatatttacaatttaaatgattcacttaaacatggtgtttgtgataaaattaattcaataccttatactttaacttcattaaaagatccattaacaacttcatttactttaccaatgggtgataatgatgatgaaaatttaaattctttaaattctttaaataatcattcatttaaattatctaaaacttggatttgcattaatgccgcaaataaaatttctaaaactttaattgatatacaaactgataatattttatcaacaactccattatttgcatgtactctttctttagcttcaattattcatatttcaagttatatttggcttaaaaatcttaaaactgataatgataatgataattcaaaggaaattgatttattagtagaatatttgtcattggaactaaatggtatattattttttgcaaatcattggagtagaccattaagattatttcaaaatttatccttagcaattaatcaatcgagtccagatttaattcatattttaattaatgaaaatccaaatttcaaaaactatttattaaataatgatatcttagtattggataacttatcatctgatgataatatggaggatttcagtcctaactttgttcatagaatgtttgattttaactttattgtgtagtgtatagatctgtgtattataaatattacgtaagtggccattacttttcatgaaagttattaatattttcaaatcatcttaatattactaaggaaagatttatgcattcttttcattcaacataccagcctataatggaacaacttagacaaagaaagaaaccattatcaacaacaattattaaggatgaacattctggattgaaatataattatgaagatcgattatcaaaattaaaacttttcaaaacttcaatcttaatgctttatttaacattagcagttggttatttttcatttagcagttacgaaattttttcaatgtggatatttgatatttattggtattactataaaaatgttagagatagttcaaatccaaattttctaagagatatttattttaatgattcaattgttacagcatttcatctatttaagggaattgtactattttatatctttaaattcattaatagtaaattattattaacttatgatgataatgatgaacttgataaatataactgatatatatacccttctttgaccttttctataaaaaaatataaaactgtatgtaattaattctcaatttccgtccaacaaacgcctaaattatctaaaacatcacctaattgtttaaaattaacaattttaccatttttattaataatttctaaaatttcattaatattaataggtttataagttaatatcttataattgaatttttcatcctctaaaatttcaataaccttatcaattataacttgttcaatgttatttgttataataacaggttcaacatcatcaggatatttagaaaaatctaatggttcatcagatttcgtattttctataacccaattccatttatttgggtttattcgattacatatatcttcaattaacttcaagtaatttagtttctactgttactacttcttttaataccccatatttttaattgattagataattgtgtattattccattctttgaaatgatctattcgttttgaaatttttaagttggtattaatatttgttaattcattgaaaatctcttcggtttgtgaattattagttggtattccatctatactgtgaggtggtgatttttcgacattattagatttttcattttcaatgactctagtctctgcctttgaataactgatatttaaatcggattccattgaatcaattaaatcaatctgttcgtttattgatttggtctgtactttagagaatgatacatctatctctgatgtttctgcattatcacaaatagttgtatccattattgaaatatgacttacattaccattttcttcttcatcttctttatcaattttagatctagctgtgagaaattcatcaatatcttcatcatcacttacttctgaatctgggattgtagagtctgggtttgccaaattaatgactttcgatattatatcaagtcttgaaatattacctatatcactatcatcatcttcattattattcgattctatatcttctccattacaattaacattaacattaacattatcattttccattacttcttcatcactagataatgaaattatatcaaattcatcatctgatgaattaggtatcacaaaatcaccctcttcattaccttcatcacagctatcatcaatttcaataatctcattctccttagtttgttccttgttctgtacgtccttttcatcaattttatcaaataatgcttgtgataatgtgatcatttcatcactaccacctttaataaaattaaatccttcatagagtacattaaaatcttctgttgataaatcacttggataagtataactattccttataacgtgtctttcaccagtagtatttcctttagtataatcattttcacaaacaactgtattgtttaaatcaataccatttattaatttctccttaatatctgaccaatcctttgatccgattaatgtattatttatttggttttctaaattaccgttttttgatttgagtatggtttgtttgtttattgatccaatagatttgcttactcttttagattttggttttcggtttagatttttttggtgataataaaattcttgatttagttggtgtctctgtatcatacgtatatgaagcaaactgtcgtttaaaagactctcccgtgttcatctcatgattgtaatcatcgagagcaccttgtacctgcgttcctaaactaaatggcattgcctttggaaaagaaaaggaatgtgaacatgctacgtgaacttttagttacgtaattgtttaaagaaataacgcgtcagttgatgaagagaaagttgatttggtgggagttacgaaaaagttggtttttctttccatggattagagatcaacttcttttttttggactgattttgttttattgtttgtttacttcttttaagaaataatgagcgttggaataatggataagaccagttctgtggaagtcattaaacggaagaatgatgaaaaagatgatgaaaagacattgaaaaagattaaacgtgaagaagagaagaaaaaacgtgatgaggagaaagcaaggaaagaggaggagaaaagaatacgcaaagaaaaggaagaggaacgtaaagctttgaaattaaaggaggaacaagaacgtaaagcacgtaaactgaaggaagatgaagaacgacgtataaggaaagagaaggaggaagaggagaaaagattacgaagggaaaaaattgagcaagaaagattgttaaagaaggaacaaaaggagaaagagaaattggagaaacaacagaaacgtgaagaggaagcacgaaagcgtgaagaaaagaaacgtttggaggaagaagagaaaaggaagagaagggaagcattagaggctaaaaggattgaacgtgaattagagaaacaacaggaagaggaaaggaaattgaaggagaaggagagggaagttaaaaagaaggagaaacagagtattgttaattttttcaaagtcagtgaatcaaagaacgataatgaacataaagatggtgaaactgataatggagatggtgattatagtgtgatatcagagaataattcaattactgaatttgagaaatactttttctgtaaagctccagttactgaagaaatacacagtaaatgggataacatagatgataaagcagaaacaaataatgattataatgaccaaaataaagataagagtagtaaaattacagataataatataccccctgccactattcctgcaagtagaattattgaaagtttaaattgtggatcaatcgatgaagctaatgagttattccgtaaagtaccattaagatatttgaaattttatgagaataggaaagcacaaataacaacattttcacgtccacttattaaagattcacaattacatccatggaataaatttgagggtattgattacgataatgatgatgatgatgatattgatgacgatggtgaggaaggggaggatattaacagtgatgaggaagacgaagaggatgatgaagaagatgatgaaggtgacggtgatgatgatgatgatactgaattcgttgaaaaagatggtactattacaggaactaaacgtagagagggcccattaattgcagtagtacgacactgtcattcttctacaacggaaacagatgaattttcccagtacttctctacattgcaatggacaccactggaaacaacaagactgaaaggttttaaattcccaatagatccatacaaggactactggtcatagtaataatactagtaataatgatagtaatcataagtgtaaagtctataaaaattcaattaatttacccaaataggaaataacgcgaatatctcccatttttttcattttttccgtttctttcgcctggaacatgtttcatcaatttgaagagaatttagtgtgttaaattgtgtgtatctttcttttctttaaagtagacaaacaatgtcatctcaagctccttcctcgccagtaccatcatctcctgctggtgctgcaccatcttcacctgtgctaccagcatcaaccactcctactccatcatcaccattatttctaccaaattcatcatctcctcaacgtgatagtaatagtcaacgtataccacaaattcaatcacaatcacaatcacagcgaaattttaataacttgtcaagtccaagaccaagatatactggacgtggggatcttaattcctttgatcataatattcataattctcaacaaacttcatcaagattaaattcaacttatctatcatcagatggtccaagtgcaactgttttaccttcattttcatcttcctttattggttcagatgctgataccattagaaatggtaacaatatcaatacttctgatagaataaatccagaacaaaataataataataatatgacatcagaaattgatgataatactccaattagagttatttggggtactaatgtttcaattgaatatgttactgataaattcagaaattttttaatgacttttaaaatgaatgatagatatacttatgatggtacagataatgatataattgatccaactgctgatcaaccttattatattaatatgcttaatattttgaaaaatactggttcaacaaaccttaatttagatgttcaaaatttattatcattatcatcaactagaaatttagctaatttgttagttttatatcctcaagaagttattccaattatggatcaaactgttaaagattgtttaatttcaattgttttagatgatccacaatttagagatacacctgaaacttcaaatttagttaataatattgaatctaaaatttataaagttagaccatataatatttcaaatgaaaaaggtatgagagaattaaatccaaatgatattgataaattagtttcaattaaaggtttagttattagatcaacaccaattttacctgatatgaaaaatgctttctttaaatgtaatgtttgtgatcatacaattattgttgaaaatgatagaggtataattcaagaaccaagaaaatgtccaagacaacaatgtaattcagcaaattcaatgcaattaattcataatagatcgatttttgcaaataaacaaattattaaattacaggaaactccagatattgtgcctgatggacaaactcctcattctgtttcaatttgtatatatgatgaattagttgattcatgtagacctggtgatagaattgaagtttgtggtatttttaaatcatctcctgttagagttaatccaagattaagagttgttaaatcattatttaaaacttatttagatattgttcatattcaaaaaattgataaaaatagaattggtacagatatttcaacattagagaatgaagttagagaaaatttacaaattgatgaaattagagaattatcgaatgaagaaattgataaaattaaaaatttatcaaatagatcagatatttatactctattagctagaagtttagcaccatcaatttttgaaatggatgatgttaaaaaaggtttattattacaattatttggtggtactaataatactaataatccaaatactaaaactagaggtgatataaatattttattatgtggtgatccttcaacatcaaaatctcaaattttacaatatgttcataaaatttctccaagaggtatttataccagtggtaaaggttcatcagctgttggtttaacagcgtatattacaagagatattgaaacaaaacaattagttttagagagtggtgcattagttttatcagatggtggtatttgttgtattgatgaatttgataaaatgagtgatcaaacaagaagtgttttacatgaagttatggaacaacaaacaatttcaattgctaaagcaggtattattacaacattaaatgcaagaacatcaattttagcatctgcaaatccaattaattcaagatatgatccaaatttaccagttactaaaaacattgatttaccaccaccattattatcaagatttgatttagttttccttatattagataaaattgataaaaatttagatgaaaaattagcaaatcatatttctaatatgtatttagagaattctataagtaatgcatcaacatttgaaattttaccaattgaatttttaactgcatatattcaatatgctaaagaaaatattaatccaaggttaacaaaggaagcaagtgatgaattagtttcatcatatgtttcaatgagaaaaatgggtgaatcaagtaattctaatgaaagaagaattacagcaactacaagacaattagaatcattaattagattaagtgaagcacatgctaaattacatttaagagaggaagttaaagttgaagatgtagttgaagcagttagattaatgaaatctgcaattaaagattatgcaactgatccagttacaggtaaaattgatatggatttaattcaaactggtataagtacagaggagagaaagagaattgataatttagataaggaaattattaaaattttagaaaattcaactgaaattgtttggactgatttaatggaacaattaagtcaagaattaggatttaatgttgaaaatcatgaattaggtgaatcaattagaagattagaaggtgatggtaagataattgtatttggtaatggacataatagacgtgtggccattaatagacatgttgtataatagtttttgtaactttttatattaattttatgttataatttaaagtttaggatatatactataagtttcaaatagatttcctatttaggaaatgtgtggttaagtagcaatgcctaggagaagattagttttagctaatatcattacagttgaaaagggtatggatgaattgaatgtactattataatagattacagtcttacataaatttatagtatgataactactaatatacaactataataccgtatataaaccctataaaatgacctacacagctataataacattaacagtggaaataatttaattggatgagcgagtgattattttccaacatgaattttaatgctttacattggagttattatattggcgttagactggtttatattataacacatccatcggacaatgtttgctagacaatctttaagaactgcatctgcacttagaaacaccactgcaagaagatctgcttcatctcttgcagctactgttcaatgtatgtattaagatattcacaaaggaatttttttcatttcgatttctccacattttctatcagaccatgaatactaacattggcaataaaccacaaattactatttattacagctctttcagaaaaatctatttactatggaaaggttgcagttgaactttctaaagcagtttatgttaaggaaggtttacaaccaccaactgttgcagaattcactaaagtttatgaatgtgcagttgcagaatcaaagaaatttgcaaaggatccaaatgcacttttagcattagttgcaaagaatgcacaaggtttctcaaaggatgaaattttaagatacatttgttacttcattcaagttgttggatttttctcacttggtgaaatcattggtagaagaaatgttgttggttatgcagaacaccattaaattttagacctaatataccttatattagactattatccccatcatatatattcatctaatttatttatagttacctaaaaaaaagaatatcttattttatcgtagaaaggtatgcatttactatactattaaaaaagaatttctatattgatcgaaaatattatgtacaaatttataaaattaaactatttattgaaagttgggattaattcagttgtgataaattcttcagctattgatttaccatatttacaagttattgcaccaatgattgaagaagtaatagttgagtaaattccctttggtttatataatttatcaattttaccacctggtaaagctttcttacagaagaatactgaatcaatacctttatcttgagcgaaatatgcaagtaatttatctgaccataaaagacgatgaccaatagaaccaattgcagttaattcattatttgattgatttaatacatatttagttgcaattaattgtaaagtttgttcaccaataaatgataattgtgaattataaggttttaaaccatgagcaaatgatttatgagttaaaatttgtaataataaatcattatcaaattctaattttttcgataaatttagtgattcaagataatttttcaatactaatatatttgaattattttcaccataaccataactaataccatcagatgataaaatttcacttggatctcttattaaaccctgtactctttgaccacgcacaaatactacagatcttgtacttgtagtattatagatggaagatcctactctgttaaatatggagggcgttcttaacattctactaaaggattgcatgctgtgtgagtgtctaaaatgggtccctgtaaactacctaccaacacactatactaactaagtcagacatttaaaacgtccaaagagtgaaaattgaatttttttcatcgcagctttttttaatatatggaaatttcactcagtggaaaatttcactttcctttttggtattatgtaaggtaaaaaatattttttatttttattttcattaattgtatatatgaaaaatttatttatcttcttttaaaaggcatatagtattagacactaaggacaatggatatatttagagtgttaagtagaggtgcctctttgaagaaatctaaagattacagagcagattttacagttcctgagaaaaaatcaggtgaaaaatctaaacaagaaattaaaaaggatgaaattttaaatttacaattagataaagaattagattttttcaatagtaaacaacataagataattagagatattgaacaagcaaaggagaatggtgataagagtgatgatgaagagtctgaagaacactttaaaagggaagttaaaattacaacaaaggaacaagctatagaattacgtaaacaatttggatcaaaggttacaggtcatgatataccattaccaattggatcatttgaagatttaataagtagatttaaattaagtaaagtattattagagaatttgattaaaaatggatttagtgaaccaactccaattcaaagtgaatcaattccatcatcattatttaaaagagatataattgcatgtgcaccaacaggttcaggtaaaacattagcatttttaattccaatgattcaaaatattattgatagtcgtaataataatgaagatgaaatacaattgagaggattaattgttacaccaacaaaggaattagcacaacaaattaatggacaaattaataaattaattgaaaatttaaatattaaaagtggttatcttaataaatcattagcatcaaaatttagaaatgataataataagattaaaaattctaaatttgatataattgtaacaacaccacttagattgattgatttaattcaaaatactaaatcattagacttaagtaaagttgaaaatttaattttcgatgaagctgatacattatttcaaactgatttcttaagtcaaactgatgaaattttatcacatttaacaaatccaaaattattgaaaaatatttattcagcaacaattacatcacatgttgaagaattagcaaataatataatgaaagatccaattcgtataattattggattaaaggaagcagcaaatgccaatattgaacaaaaaattatttattgtggtgatgaacatggtaaattagttgcaattagaaatataattaaaaatggtgaatttaaaccaccagttataatttttttacaaagtattgaacgttctaaagcattatataatgaattattatatgatggattaaatattgatgtaattaatgcagagaagacacaaaagcaaagagaggatattataaaaaattttaaaaatggtaatttatggtgtttaattacaactgatattttagctagaggtattgattttaaaggtattaatttagttattaattatgatgtaccaaattcttcacaatcatatgttcatcgtattggtcgtacaggacgtgcaggtaaaaatggtaaagcaattacattttatacaaaggaggatactgatattattaaaaatgttataaatgttatgagagcaagtgatcaattagatggtatgcctgaatggatgagagatgaaacatcattatctaaattaagtaaggatcgtaaaagagaattaaagaaacaacaggtgaagaggaaacgtataagtacagtttcaagacatataagtaaacaccaacatgcaataaacccaaagaatgggtagtggtaagaagaagaaggcttaatattttataaaagacgcgttttgtaagtaaagtttttttttatttttatttttattaatgggggaaaacattgtccaacatgaaatattcgtatttagttaatgctcagcactttttctcctttttgatttgccttttgcttttcatttagtagctatccactctctttacaatgactccacaggaattggagaactatagggatgcacttcaaagtttcctgtcactatgtggtgggaaattaacacctgaaacttctcaaagagttattaaggctagagataaattgaaaaaattaacaactgtacaatttcatgatttaagtattgatgttcatgatgaaatgatgagaagagaatataatagattaaacgctgatgatccaaataatgcaaaatatttagcttctgaatcaaattatcatcctaaaagaaatcaagcaagacaaaaattagctagtttaccttctacaagatttaatgatttagttaatgatgttgtatttgaaattaataatagactcaattatgttaataataataatactacttcaaaggatcatcatacagccacacctgttgcactaccagttccatctgttaaggcaagaaatcctaatggtttgactgttaatgtagataaatcaaataattatgataaatcatctgatgatttctcaaatgtgataactccaataactccatctcaaagagaaatcaaaccaattactttagttcctaagaaatcagaactcacatggtcaagtgatgaagaagaagagaatgatgacaatgataaggataatcataatgaagaatcccgtaataacaatattattgctaataaacaaattcaacttgatgatgatgcacttcacagatctccaagtaaacgttatactattgcaactaatgaagttctgaatgaacatgcaccttcagatctgagattcccagttgatactgaaactgattatgaacatgaaaaaattcaacatcctaatgaatttgatgaaaatgatgatgatgatgataatcatattgatatgacaattaatcaagaagaagatctctatgatactgatatgttgaaaaatgaagttactgctttaacttctagaatacatgaattagaattagaaacttctaatcttaaatcatatgaatctaaatacaatcaattattatcagaaaatgatgaattaactcaaaaagctcaagactatgaattaatgaaaactgaattggatgaattaaaggaaaaatattctcaacaaagtgaagaaatgattgcattaaaggaaatagctgatagtaatcaagaaaaagaattaagtgttgaagattcagctgaatataatagtctgagagcctatattgataaagttttagaaagtaatgaattacttaaacaagaaattgctgatttacaaaataaaaagagtaatgaagaaattgataatgatttgttaaataagaataatattctaaatgaaaagaatattgaattatcaaattcttatgatgaattgagtgataactatcaagctttacaatcaaaatatgaaaaaatttcaaaatcttataatgagttagagaaaaaatctaaaactactgcaattgttacaggtgtgggagccggtgttgctggtttagccggtgcaactggtttagcaattaattctgcaaaagcaacaggttcattagctaaagattcaacatcaaatattgtttcaaaagctgtagatccaatagataacacaccaatggttgataattcaaatctttcaatcgttgattggcaaaataaatttcaacaattacgtagtaatcaatttgaaattgaattaacttcgcttcctaaattacaaaatgatgaaagtttatttgcaactaatggattaatttcaattaaatcaatttccgatatttatacatcttttgagactttactaatttacttagattcaattaaagatagtaaaaatattttattagttgatccaaagaaaatcgatgcgatcgttttatttgaaattgtggcaaatactgtaagtaaggttaatttattatctgaatcaatcaaatcaaatgacgaaaaaattgacaaagttaagaaaattttgaaaaattcaattgcaaatctattatcaacaactaaatactatgcattatattataaaatattacctaaacttgtactcaatgcatcaataaatgatgtttattttgcattttgttcattagtttcattagttaaaattaagggtgattctcagaatgatgaaattttaagtccaaaaatggaaaattcaacattattaaatgataatgcaactgtaacagaaactccaattgcattcaaatccattgatacagtgccaaatgatgatgaatctccaattaaagttcagaaggccagatctggctcaattgttaacgtaccaactactagaccattaagaattactcaaagattagcatcaaattcaatctctaataataatcttgaaaatccaagtgacattaataaacctccatcaaatattaactcaagaactggatctccaatgattttaaatagttctattttaccaatgattgttacatcaactgataatttagttaataatgcacttggtaatataagtaatggtagcattgaaatgagaaataataatagcagtaacaacaacaataacaatattaataatccaacatctaatttaagtaaggcttataataataattcagttgaagataaaaatgttgataatgataatattaaaaatatgaattttgatccaaatgatagtgcaatttcagtatctagtaatttagtatcaccagaaaaaaatgatttaacaaataaagtaactgaatctcctgaaaaattttattcacctgaaaaaattgaaactccaataaaggaatcgtttaatgactctaataaagttacattatcatcaccaattaaaaatattaaacaaacttcaatatcatcaataaacggactcaatgaattatcatcaccagagagacaaaattctaaaaacaattcaatcacacatgaaagaaataattctaaagttagtttaacatcacctgtacgtggtaaaaatattttagataaaatgaaaaaatttgatacatcaattgaagatctttcaaataattcaatcgattctaaaaattccattaactctaataaagttaaagtaagtggtgatgttgcaaaagcatttgataaatttggtgcaaagagacgtagtgttgatttaacaaatgataataacaataataaaccaactaatgatgaaaatccatttattgaaaataaatccaatttagaagataacaaaaaatcctcaattttcaataactcagttgaatctttcaatagtagtattgaagattattcaggtagaattgttgaaaatactccatttgaggatccaattttaaccactaactctaatcctgaagaaacatcacctgtaactccaatatctgatcaaaatgatgataccgttaatgctaaaaagatggaaatccaaagtgttaatcaagatgaagaagaggaagattttaataaatatggagaaagtgctaatacttctaatattgagcctcaaattgtaagtaaagaatctagtagtgttgaagatccattaatttcagctggtagtgcacttgatattgatgaagcattagttaggaaagttagtagaagagcaagtcgtgtaataaataaaaagaaagttcaatcattcccatctataccaggtgattctgattctgaaataccagctcaaacacaagcacaaaatcaaactcaagcaccagcaccaactcataagcaaacaccagctcaagcaccatctccaactcaagctggaactcaaacatatgatgaagatacaggtagagaaggatggaaatatgatggagaagaggatgaaagtgaagaagatgaagaatttgatattgataaattcaatacattaaatccagataacacattacgtgaattattattatatcttgaacatcagacagttgaagttattaaagcaattcaacaaacattagaaagtattcgtgatccaaaggcaactaaaggattattaagaaatggtgcaaatgagattaataatgttgttaaacaaatgagtgaaggtacaagtacattaatgaatcaaagtagatatattgaaagtatgggtcatgcaaaatatgttgttggagttttagaggattgtgttcgtagaatggaagttttatatggtactgatactagtaaggataatgaatttgctggtaaaaattttaaacaacgtagtgcaggtattgcatttgatgttgcacgtagtacaaaggaattagttaaaactgttgaagaggctagtcttagagatgaaattgctgtattagattcaagattacgtagagaatgatgtaaagttaatgtgtattattgtagataaataaattgatttttaagtaaaaataaatcaaagtagaatgtttttttgttgttatacagaagtaattgaaaaatatttttatatagccaagagaaaagaagaagaacagcagtaaaaaaaaattgaatattaaagattgtgtaaattagtattaaagtttatgaattttactcagttcaataatgtcagtttcagtttcaagagttgtctgattatctatacttttagtaaggtattttgccttgatgaacttgtaaaaaacaataataggagctgaaagtccataaacaataactgaaactgtaactagaaatgaaacaactggaaaaactgtattaattaaatgagataatggaacatcattagaaacgattacatcagcaataggagtttcctctgtatctagtgcaaatttttctaatttggagatagctaaaatacatgcaaagagaccactaacaccaattggaccaaaatgactaacaaaaattgcttcctttaatgaatggatatccggtgataatttataataagctaaaacaggaggaaatcttcttaaaaataagaaaataattgcaataacaatcaatctccaaacatctatatttaataaatgattattaaaattttcccaaggaacagaggcaccgaaataaataaaataagccatatttaaaaaacaatcaagagaatcaataaaactttcttgttctaataataattcaccattttcaaaccaatcatcccaaacaaagccacaacctgcaaagaaagcagcaagtaattcatcgacacctaaaagaggagttataccagtaatgaataagccaatcattataacaaataaaactttagattctttattaatccagtctaattttttggaaagtctaaatgcccaacttaaagcgtaaccaataataaaaccaataattgtaccaaataaacattgatataatacggtaacacaaataaagtttttagcgattctatgactatcaccagcatctataattaaatcaacagctaaaaaaacaaatggaacagctaaaccatcattacaagctgattcagcagttaataaatgtctaatatgagttgggacaaattcttcggcaaatttcgatttaccaataacttcttgagctaaaacgggatcagttgcggtaacacaagcagatattaataacccccaagtaaatgaataatcaggtaaaattaaatatataaaagctgcgaaaactaaccaacctatgatcattgaaaagaataattgtaaaaaaattgcccaagcattacgaaagacatattttggaggtaattcaataccaactgcaactaattcaatacaaagtataattcttgaaatttctaaagtaatataattaaaattcccccaatcatatggatttatccaatttaaagcatgaggaccaataattaaaccgaaaattgcagctaaagttgcttcaccgatataaaatatttcctttataagacgagataataggcaaaataatatgcaaaaaaaacctaaacaagcaaatgatacatttgagttatctatctctagttgattccatgccatatactggtggaaaggtgtatgatttgattaattcaagtatgccactagagtagtgtacagtagggaagtgaaaaaaataaaaaaaaattcaaattattatgggatgtaaatgattacataacccaccactggtttaagagaggtatatgggtttcgatgaagatatacaagagggtattagctctccttttatagttgtagaaggcaaaagtgaaagtgaaggctcattccattcactttattaaactagatttacccacccctttaggggaggctcatttgttgctggattggagaactttacttcttttcacttcttttgcttcttttgcttatttcacttctcaaatccttctacagtacatactacactcgtagtaagcctttagtcttctaattaagatcttttaattgaatttcacatgatgaattaatatagtaaagtatgacataagtagggtccaagcagagcctgactccgacatgaataggattttggtatagtctgacaaggacttgactacgatttgattagaatttgattatggcttgattatggcctgagtacagtccgactacaatctgatcactgattgaataggaccagactaggatcagactaaaaatttaagtagagcctgtttgaggcctaatttgagtctaactctagtgtatggctaccacttgattagagtctgttatgttttaaataaataaataaagttgctataaataataattgtaataaaataagtaggggtatattcattaatagtaagattaataatttaatgattttgattaaacattaaatatattatttttcagaaatcattttaaattcttcatttgggtaacgtattcttttaatgaatgagtacctttaataactgtaatatcatctctattagagtataattcactatgaagttcatcatgaaattttggtgataatgaagtgaaaatatttaaaactgtatctctattaaatccataggtttccattaaatcagcaacattttcagctggtacataattccattttaaatcaggtttattgaaaacttttgcatataatttagttaattcaggaactgtgattctatcactttcaacaaaagttgtcttgaaaactgtttaattatccttacctctctttggtggattttcaataattttactaataacatctgcaatatcatctaatgaagtatatgaataaattttcgttttatctaagaatgaattaatttcacccttttcaatctctgataaattaactaataagccagaataaaattttgatggtttaataattgaaatactattaacattaccaattaatttattttttaaaaatttgttcattataataatgaaattctaaaccaccaatacctggtttataagtaccaattgaacttaaataaataatattaggaacttttgattgtaaaataatatcagcgatatatatttcatttgtttaatttgattcttgaacaatatttggaattgtataaggtaatgaatgcacttaaaacgaataaaaaatctgcaccttttaatgtttttaataaaaattctttatcattaatatcaccaatagctggaattgcaccaaaggacttaatttcatctgctttatctgatgaacgtgtaataacaacagtttcaacaccatccttagctaatttaattgcaagtggttttacaacattacctgttgatctgaaaagtactgctcacattatttgtttgttgatataactaaatgacacatttcatttcattaccaacaatctactactgggaactacccttatttatatacacatcagagtgataatactaagttcggagtttcaagataagtcctattagaaatagcaccatctttgtggcgcattataggacggattacaaatagtaatagtaataaaataagtggcgcagtgaagaataaggtggctgttagtatactaaataattagttaatagatctatattatgcagtttgtgttaattgataatccgtttactatgagaacattggcattgttcacatttttttagttaataaacttaatattatttaatctattgtttgcatatcgtatttccatcatttctgttatatcactgaaattttttttttttccttctttaccattactttctcttttttgtctcctaaaattaaacgaatcgttttaatacgggactcttcctgtttcatttttgagttaatttaattaaagccccaaattttatcttcctatttataaatttagtacttttcatcccgatattattaaatacctgctttttttttccttccttttctcttttcttctctttccgtctttcgttctttctataataacttactccatttattaaaattaaattgaaattttcaatttcaatctcaatttcaatttcaattttgactcgttcactattatattcaattgcaattatttcaagttatattcacattcacatttacaatggaattacataaatcattcgatcattttaaagatctatcacatgatcaaggctataataacaataatgataatatcaataataatattaatcataatggctatccaattactttatcacaaagtcaacattctgttactaatgaatcattctttaatccaatgactaatatctctaataattataataataataataataataataatgatcatcaaaatcaaaattttgatattaattataatgaatcagataatcaaattcaatcaacatttttacaacattcacaatcacattctcatatattaggtagaaatagaaataataataataataatgatgattatattattaattcaaatccaatgtttatatctcattcaatgagttcaattaattatgattttaataataataatactggtaataatattaaccataataattttaataataatatcaataatcattcaatacaaaattcaacaagtgttaattctttaatgaatactagtaagattgataaaagaagtaatattactaataatcttaataatggtaattattatagttataatacaaataatagcaacaataataataataataataatagcaataatatccataataatgaaccaatgcatgaaagttttgataattatcatcatcaacaacaacaaatggaagcacagatgcaaatgcaaatacaaatgcaacaacaacaacaaaagcaacagcaactacaacagttacatcatcattcacaacctccaccaccattaccaactccaccacctccaccaccattaccatatgagaatccaattttatatgaagatttattagaattatccaatattacattaaatattgatacaatgtttaatacaattaatataaatgagataccaattgattcaatttataaaggttatgatattttaaaaaaattggatatattatataaaagttggatttctacattaaatataacaaacagtatgtcaaatatgaatcttaattataataataataataataataataataataataataataataataataataataataataataataatatacaatcaaatgaagataaattaaattcaatatctgaaggtaaagaattaaatatgaataatattaatcaaattaaaaagaatgaaaaggataatgataatgatattaatgatagggaaaaggaaactgagaaatttgcatgtttacattgtaaatcaatgggtacacctgaatggaggagaggacctgaaggtgagagaacattatgtaatgcatgtggattattttattctaaattaattaaaaaatatggtgaagatagtgccaaaattgtaatgaaggataggaaagataatggtaaatgtaatgatcgtagaattagtctaaataatttataaacaaaaaaactagataattagataacttataataaatcaattttataaattacgaaaggttcataatttgtatcaacaatatttgaataatcatttaatttactatcatttaataaattaccattattatcaattgagaaagcattaccagctaaataactaaattttttaatacattgattatagattaaatctaaatttttaatattatcaattttaattaaataataattaaaatttggaggtaaaccatatcttaaaacggattcaacaaaacttcttaaaaattttatatgataataatcaattgaaattattgaataagcttcccttgataaacgtaaaatatcattttttaaattattttcatcaattaataaattattaaattcatcctttaatttattaattgttgaatcattataagtgaaatctcttggtatccatttattttctcttgatgcatgtaaaaattcattttcaaattttttaaaaattatgactgaatatagagaaaattcattatcttttgaaattaaatttgctgaacgaggtacaacaaatttacttattgtttcataagtatttaagaattcattttcaattgaatttggtattgctaataaaattgttttcaaataatctgaattttgaataaaatcatcctttttaacaatttcatgtaatgatttaattgataaatcaccattttgtttacgttttaaattaattaaattatttttaatattaatataatttgaataagaattacgtaaatcattatctaattgaattgaattatttgaaattaaattaattaattcatcaattgatttttcaattctataaattgaatttttccattgaaatttttctaaatatgatgattttaattgattatcaatttttaaattaagttgtgtactggtactatcacctaataatgaattaagtatttctaatgatttaataattgataaatttaattgattatctaattttgataattcttcactttgtaaaattaatgaatcaagagtaccaattttgaaaactggtaaattaattttatttatattttttgaatttaaatttaaattattttcgaaaaaatttaaatttgattcattatcactatttgattcaggtaatgataataatatatatgacatggtggatgtttagggggagattatagaaaaagaagtgtgtatttatagtcttactatcggataacaagtggctgcttaaaattataatatcctaagttgagaaggtgagaaattaatctatatagggttattacgtaagatgggattattattattattataactgtgataacttattagagagttctgatttaagattatgaacatcattattaatgaaagatttaatattgattaattctgatttccatttattatccattaattgtaaattattgagtttattttgataaatttcatcatgtaattgaattaatttaaatttttcatttaattcatttttaactgaattttctataatttctgtataattatcaggtatgttgtaaagatcagtaggatttaaatcatctctattataaatttcagagaataatttatcatttggataatctaattgagatgaaggaggtgattgtaaattttggaaatttaaaattggtaaatttaataataaattataaagtaaattataggattgatttaatttaaatttttgaatttccaataataaaagttgtgaattgtttgtaattatatcattttgtttaattattgaaatattttccaataatgaattattaattaataatttaaaattatttttattactaattaaattaattgaatcgaatatgatattttgttgaattttatttaatgatgagatattaaaattttttgattgtaggatagataatgaatctagtagtagattataagattgatctatagatgtgaggtatttgattgattcttccattaaagaaagagtgtatgagaagatagataattaatattaatattattacgtaagtaaaattacacagtattataaatgattaaacaattggttctgttgattcattaagttcatcttttgattcttccttaagttcttcctttgattcctctttaggttcttcatctttagaatcttttttagagaatggattaagatgaggataagttttaaataagattgtagttgcagagataattgctaatgaagtaattacagtaattgataattgacgttgttttttatttaattgcatggtgggatggtggtatgattatatgactatatgactatatgattatatgattttattatattaataaaaagagaagaagagtgtagtatttaaatgaagaaataaagatcatatactcttatcaatatatcagtataagaataagaataagaataagaatactcgctagaattacctaaaagggaaggtctatccattataatatattatactaaattaggcgggtattttaattttaatttaaaaaattatttaaaaaatttatacaataaatattaatagaggtatctatacttataataaagcagctaaacctgcaattgcagctaaaccaccaccaataacagcttttggagcagcattttcaaattcagaatgagtagtattagcaggtggagaaactgggattgaagtagttgaagtttcagttgcaggtggtgcagttgtagttggagcagtagtagtttcagttgaagtagttggaacttctggttgattttcagttgttggagcttgaatttgaccatcaccaatttgagttaaaacttgatctgcaacaacgattgaagctaatgaaaggatagttaagaattgcattgtatgtatgtgtgataaacgaatgtaagagtttgataaaagagtaagaggaagaaaagaaagaagtagtaatggtagtatacataagtgggaagaaatgatcttttatagcagagtaagagtggaaaatagaaagagaaaataatattatataaacgcgcgcttttatttatttgtttacttttcgtttgtttaccttttactgtggtttttctatttttctatttttctattgtttattggatggtggtgtgttggtttattattattatagtaaggtgatggtagtagtagtagtaaggagatgctatttatttttatttttatttttatttgttaatgagtggaaattattattataacatccgacatttttaattctaggctgtcacgtgagtgttacgtaatctttatttatttattgtggtggctcatcctttagtaattgccctattattatgattatgattatgattatgattatgattatgataactattattactctcttttaatattttattattttaagtagtatcttcatctattatctaaactgttccaaaatcaaaacttgcacattctttgaaaatgccatttttctctttctaggctcagctatttattctctttttcttcccatcatctctatttccttattatttcactaattaacattataaattacttaaataaacttttctctttacattgataccctaatacacatatattatcattgattaacctacttttttattccatattacattattttattattatctcacaacatttttcttgtcgtgataatggacataaattttttttctctatttctttatttcattttcctagttttatattaatacgttcttaattccttctccatacaaccaaatggataataaattattgaaaaaattaaagaaaaaatcatcccttcaatcatctatcaacttaccattcacagaatctcattttaatcaacttttaaatgaatttaatttaattcatttaatttatcatagaaataaaaatcaacatcatgtctcaaattggtggaaatttcttaatttaattcatagaaatttacgtaaattcttaattattattatggatattatggaattaattcatttcaataatatttctaaaataaattattcaaaaacttgtaaaaattttaaagttattaaaattaaaaaatctaaaaaattcaaaaaaatggataaaaattctacacttttattattaaataataaattaaaattatttaataaacaattttcatatcttaaaaaatcaattaaatcatcttattggaattttatgaatataattcaattagctcaatttgttaatataggttttgcattaattgcaattttatcgaaaattaataatattttattaaatattgaaaataatgatagtaatatagtaaataatgataatattataaaaaataatatcatagaaataccttcaaatgataaagataatgaagatattggtgaaataataatacaaaatgatgaaatagaggaattagaggaaatagtggaagtaccaaaggaaataccagaaccaattgaaccaatagaaccttcaccaacagaaccaaagaaaaagaagaaatcatcaaaatccaagtcaaaatcaaaatcaaaatccaaatcacattctgcaattgatgatatattcggtttctaatcaatatttatacatgtataatactttactaattatttaatatttcatctgcccatgtaggtaaaataaaacttgcttcatgaattttactattataatatttaaattcccccttaacttctctattagccttagtaatatcaatttctttatttttaccacataccattaatgatatttgtcctgatgtatatgatggtattgtacaataacatgttttaacaattgggaaaatattttcacaaacatttttcaaatttttcaaattatttaaatttaaccaaatattttcacttgccattgaaattacaattccatccttatttaatgcattatttaataaattaaaatatccttgttgaaaaaatgcttcagctggtccttcaggatctgatgaatcagttataattacatcaaatttcatatcatccttatcatggatttcctttaaatatttaaatccatcatcaagtacaactttaactttctcattttcatatgatttactcatatttggtaaatattttttacttaattgaataaccatatcatcaatttcaactaaaattgcttccttaacattatcatgtttaataatttcccttaaaactccaccatcaccacctccaataactaaaactctctgtggatttggatgtgcaaataatggtatatgactaatcatttcttgatatgcaaattcatctctttcagttacttgaattataccatctaaaactaaaacattaccaaaatttgttgatttgaaaactaaaatatcttgaaatttagattttgaacaataaagaattttttcaactttaagcataaatccttgtcctgggaaatattcatcacttatctctctaaaccatccatcaatgattaatgggtgtgttaattcactcattgttttgtcaatgtaaaagaaattgtatagactctatcgatgataatgatattatttttccttattatgtaaagataccgctattacgtacagtgcatgaaaaaaaaaatttttgaaaaattattcagtttattgctatcttctaaacttttcaacaaccaagaaataacaatgaaacatccatttcaacatatattattagataaaactggtgaatatttctttgctgctgctataaatactgtttttctatttaaaattgttaaaaatgatgaaaatgataatgatacaaattcagataatataattgaaaatgctaaattattaggttcttggactgatgaagttgatccttattatacaattagaaaacatcatagagaattattagaacaatatgaacaacaacaaagagaaaaggaggaaaaggaaaaagctgaaaaagctgagaatgaattaagttcaaattcaaccaatgaaaataataaaagagaaataattccagttgaacaaattccaacatcaacaaagcaaattatgaataagagaccaaaattaccattacctggacctggtgctcctccaacttatacttatattagagatatgacattatctaataataatgaatatttaattataacaactgataatgataaagcagttgttgttttcaaaattaattataatccatcaaatgataatgaaaaagttttcaatttaactaaacgtcaaccaatgatgaaacgtccaagtgctatttgtacaactattgatgatttaaatattttaattgctgataaatttggtgatgtttattcattacctttaaatgatgaaaaaattttaaatgataatgaattaaaaccaattttaggtcatgtttcaatgttaacaggtgtttataatacaattgatgaaaataataatcaagttatatttacaactgatagagatgaacatatacgtatctcttattatcctaaaagttatataattaaaaaaattttatttggtcataaagaatttatttcaacttttattttaccaaaatggtgtaataataatatattagttagtgcaggtggtgattcatttatttatacatggttatggaaatctgaaattgaaggtaatgaaattaaatgtaaatttaatgttgatgatttaattaaggataaattaaatgaaaaacatttagtacctgaaaaatttcaaaatgattcaaaaaatttagttgaatattgtatttctaaaattattccattaaataagacaaatcaattagcaattatatttgaaaaaattccatttttatttatatttgatttatcaattgatggtgaattaaaatttaatagagaaattaatgtaattaatgatataattactgcaacttgtacaaatgatttattaattttaagttttaataatatggataaatgtttaaatttttatcaaattattgataataataatattaaaccattagaaaattctttaaaattattagaaactattaataatgcaaatgattcagttattggtgatattgatgaattaataccattatttaatactaattatcttagaaaaagacgtgaacattagtatatctttgtataactttatataaattctctcctttgattataatgtgatttatctaatacaccatcaaattttaaacaattcatccaaattttattcctaccttgtacattaattgtccattgagattttaataatttaacaataattatcttatgtggtgaattattatcattatcattagtaaaaatattagaattatcattattttcttcatttttatttacagatatcagtgtatcaatccaacctttatccatatttaaattatttaataatccaacactttcacccatttcaattaaaattgttaatttttctaatccattaacaatttcaaaaatataatcatcagttattttcattaatatttttttcattataattgcagatttaccagttattaataaattataaaatgatgatgttaaattaatcattaaattaacattcattgaattaatttgaataattaaatctctaaatttattattatcaataaatggtctactatatttaataattgaagtattttcattattactttcattaagtaaattattaactttaatatctttataattaattaaaatttcttcattatttgtaaatggatttgataatatttgatgtttaattaatgattgttcaagttttaaaaattgataatatttacattcttttattagatcatttctatgattttcattttgaattataatttgattaccactcagtccatataatatatcattaaataattttgatgatctattacatgaataaggagtcattggtggaggtctaatacatttattatttattacattataagtatctaataaagtaccttctaacatagttgtaaaataatttggataattaccattttcagttaataaatctcttggaattttaaataattcaccaccaattctaatatgtaaaggttcacttaataatctatccattaatttatttaatttaaaataatttgaatctgttaataaataaataaattcaaaatcatcattaattttaatactataaccttgtaaatgtaaataaattttatcaaatataattgatgatctatcaattattaatttatttgtatttggattatttaaaaaataatttgtaaaatatgatggtgaatcatatgataatgatgcaccacttaattgatattgttttgtaccaaattgtaaaatatataattgttcatgtggtaatacttgtggtattaagggagaatgattatcattattattttcatgatttgtacctaatgatatactcgtatgtgaactattttgcattttggttggtggtaaatatatacaaaaaaggttgttttagtttaatgttaaagattacataatccaatattcagtttttaacctgaatatacactatacaagcagatttataattagatgatattttttattatataagatatgatatgattatataattagatatatagtatatgttacaaagtattagtagttgtttgaaagaattgattttgattctattattattattattgttattattaatcaactaatttttattaaaaaaaaatgaaagtaaaaaaaaagttttttccaaatttgttatgttgtgatatgatgtgatatttatattaaagcgtatgatgatagatgatagaaatttttagttattaaaatttaaaatttcattgaatgtggtttatcaccagattttaaagagaatgaagaagctaaatattgttttaataaaggagttttcttaatttcagtaattaaagctttatcaacaattttttgatcttcaattctttcacttctaatttctttctttggagaaccttcaccaaagaaatcagattcagattttttattatttgaagatttttctcttgcaaaatatgatacattaaatttatttaaatctaaattttctaatgaaattttagttgaagttgcaataacatatcttgcattaactcttcttaatggaacaccattaactttaaaaggaccagaaactaataaagtattatcttctaaattctttaaatagacaactcttttacctctaaatctacctgctaataaaattaaaacagtacctgggactaaagattctcttaatttttgaggtcttgcagtctttctggtaagtttagcagtttgttgggttggaacagcagacattggaatgtttgtttgtttagtaaatgaaataaagtaaagataaatattaataaaagatacaaatatgaaaagaaatgataatataataatagtgaatgtgattatgcaataccctcccaatgactcacagtgaagaatttgccttttaacagtcacagcgtcttttctttgagggacgcactgttgaattttaaaatttgattattaactgtgagggttatctttattaaatatatcacgtgataccagcgagggttattcactattctatattctatattctacaattgcaatactacctttatcagttctgataactggtataatctcatagctgatactttctaattcaatatcactcatattgatatctcttggattaccgtatatctcatacattacacccttattgaatgtaaattcattgatattattaacatatcgtatatttaccttttccttattattatcatcaccttcttcttcatcatcacttgattcataatttaaactatcgtctgtaatcttatgattcataccagcccactcaactactgatcccttaggtaattcacttatttgaacaactaataatttatcatttaaactatcatcacaaatttccttatatttattgaaaatattttcaataattgataatttcctcatatctttaatataacaaatagttattaatcccgattcaaaattaattacttccttaatactattataatgttgtaatgataatattgcattaagttcaaaatctaaatcttcattaataggtaatgtcatacttttaggtattaatggaatttgtccactaattcttgcaattccatcttctctattaccaattgattgtgaatatggtccaatattacatggtgcccaatatgatataccttgaatatgtaatcctatttttttcttcaaatcttttaatataacaactgataattgtaattcaacattatttggtaatttagtttcaatacaaattcttgatggtggtaatgcccttttaaaatatttaacatactgtgaattaatctttgtaaaattattcatatcattgattaaaagtttggcacttgaaacattttcaaattcaagtttattatcatttaatattttctcaagttcttggaaaactttatttatttgctcttcacaatcaccatttggtgaacttaaattattaacatacatataatcaccatgtttaaaaacattggattcccaatttatttcataatcttcaatttcatcagcagtaacattttcattattcttcatttcattaaacttaatatcttcataaatttcttcaaatctttcagttaataatggtggctcaacaataaattgtttccaatcaatcacttcatcattaacttcctttggttcaaatccaactttcatctttaaataccaaacatcatcatttgtatgtttaataacttccctttcaattatgtttattttaccaaatttgaaaaatggtgcatcgaaaacacttgtctcaaattctccaccttcaccacaaatatgaactccaaacatttgattcaattgaattaattttggttgaatttcatttaatgtcatacctaaatttaattcatttaatccaattgctgcaactttaatgattttagcatccataccactattacacatttcattcattaattcactttgatctctttgccataaataagctaaggatgttaaacctaatcttgaacaaacatcttcaactctagtacgttgataactagataaaattgcaccaacactaacacctttaacatctggatgattttttaaaacatttgttaataaattgaataaatcttcagtttcatcattatcagttttattatattctaaattttgattagatgcattacctataattggttgtctatacattggaactccaatacatttctcatataatgttaaaacatcatgaccaacagtttgatacataaatgaatccatttcatcatcattatttttattatcatcatttggtggatataaattagctaaacaaaccaattcatgtccctgtgcaagacaatgcaagatattgaaacatgaatctttaccaccagaaactaaagcaacaaacttcatctggataaagaagatctgaatagagttttaagaaataaaaatatttttcataatattaatattaaagtggaaaaaaaaaatatttttaatcttcactgccttaatgaggtctttcatgtcgtatatcattattgtagttataggagacgtgttttatatggtatatttcagtgatatacttcattgaacagtatattatatgtagaatatagtgatagttcattatgattatctactttgtaattgatataatagctgtataaaacaaagcgtgcaaataacatcaattaatattgctactatcggtagtgataaaaaattctatgttgtttatggtataataatgtaaaccttaaacattttcttccttcaatcaaacaaatgtcaactgattatatcccaccagacatacttgcacgtttacagagaagacacatatcagcagaattcttcaatgtatttgcagaaaagacacacacactctcagagacacttaaagaagctataaggaaagatgaagagaataataaggagagacaacaattactggaattaattgaaaaggagagacaaatctatgataaaagagaagtcgataaacaacatctaaagcttgtaccagatgtacttaccccagaggagataacagcatatgatgatatcatacatgcaatgacacacgttaaaatattactgagaactcaggcaccttccaaatagaataaacagggcaacattcaaaatgatgttcacgtttttgcccttcatctcttttctatacagttgtatcattacattttcttctttatccagggaatcttctttgctttcattgatactcccaactttaaaaaaaatattattgtattaaatttaactttatcttcaagtttaagtttaaatttaattaaaaaacaaaacattattattaatcaatcaaatggctcaaagtatgtgtatatacttttattttaacttattaaactcttactaacattatctatatatagctactgctacaccttctcaaactagtggagatcttttctccgtaattgcaactgatgctccaagttccctttattcaagaatgtcaagtaaaactacagtcccttcaaatgtttctaaaacttctccaattcaaacaaataatttttggggtaatataactttaggtgatcaatcatcttatatttatactcatccttacgttgtttggaaatcaaatattaataattttacaggtttagcaatatctcatcaaactgatgcacaaaaagtttggggtccaattaatgatcataatgctccaaattatttttatagtgctgctggtataatgtcaatggttttaggttcaagtgattttgataatggattttcaatgtctttaacaaatttaaaaaaaatgtcaattgatgtaactttgaaaagtaataatagtaatgcaggttcaatgacttcatctattttacaaggtatgggtatggttactgctgtttataataatttaataccacaaattcattcacaagttggtttccaatcagtttctggtgatactgctccaaaggcaggtattgataaatataaaatcgttttaaatgatggttcagtttggtttatgtatattacttttacaaataatcaatcatgtcaatttgcacttaaagattcaagtcatataattgcatcaaattcaattaataattgttggattcaaatttgttgtggtgattttagtgattatgataaagctgcaggttgttatccaattgcttgtactttatcaggttcaacttcaaataatattggtacttattcctttaattatacaacagcaggttctggtacaactccattaatttatgcatttcctcatcatgttcaatcatttacttcaaaaacttcaagtaaaaaatcaaatgcttcaattaatgatacagttcatggtcaattgattggttatttaacaaatgttttcgaaatgagtgaaaatttaccaacttctgctaatatggatccttggtcaagtattagttcctttaaaaatgcttcatatactcaagatgaattgaattcaattagaaatgctgcagttaaagatattacaaatgatgttgcaaatttatcaaatgttaattcaatgtattattcaggtaaaattttagataaatttgcatatgttttatatgtactttattatgttttaaaggatgaagatttaacaaaacaatttttagttaaaatgaaagatgcaatgaatagatttacaggtaatagacaaattttcccattatgttatgaaacaagttgggatggtatttgttcaacaggcggtatgtcaaatggtgatacaggtgttgattttggtaattctgcttataatgatcatcatttccattatggttatcatattcatgcagctgcaattattgctaaaattgatcaattagttggtgatggtagttggttaaataataataaaacatgggttaataatttagttagggatgttgcaaatccaagtgagagtgataattatttcccaatatttagatcatatgatttttttattggacattcatttgctcatggtataacagtttatgcagatggtaaagatgaagagagtagtagtgaagattataatttcaattatgcaatgaaaatttgggcacaagttattggtgataaacaaatggaaaatcgtgcaaatttaatattagcaattacaagtagatcaatgaataattatatgttatatatgagtaataattcatcaattccatcaagatttgtaccaaatcttgttagtggaattaaatttgagaataagattgaacatacaacatattttggtacaaatgcagaatatgttcatggaattcatatgttaccaattaccccaatttcatcatttattagaaaacctgattttgttaaagaggaatgggaaagttatttaataaataagattaatggagttaattcaggttggaaaagtattttaatgttaaatgttgcattatatgatccaaatactgcatataattttttcaatacaaataattttaattatggttatttagatgatggattaacattaacttgggctttagcttatagtgcaggtgttagaaattgatttttggtattaaaaaagaagggttaatgattagaatgcttagttaaggttgggttaggatattgatttagtaatgttttgtcatttgttttatgttttttgttctttgttatgttttatgttattttctttgttatgttctttgttttaattacactctaactgtatagtctacacactttaaaataaactgtacagtaaatgacttccgatatattaggagagagataagggaaggagatagcgaagagagagagggggctcagtaatttttttttctgaaaataatttgacattttattatatttggaaagtgggaaaagattagcgaggttaatagtgagatgaaggtctcggtaggagtttccactggggaaatgtgtcaggagagccgtttctcgcttagattatcccatttactgatggtttatcgtttttgcaatctgtgatataaaaaggatgatgatgttcttaggaaacatttaatgagtgaagttactatgaagaggtttagtttgtgacctcttttctttttctttcttgtatcctttcccttatttaagtaaagttaactaagttatcgcaacacatgtatagaaacacaatactaagaagatccaatcttcttttatcaaagaatttgatttcaacagcaaatagatcgtcaataatgattagatcaagattaatttcaagtaccaatggcaaacaaaatgtttcaccaactattttaaatgattctattcctaatgttaataccaagacaactgctaatactgacaagaatgataattatttagatactttaaataataatgaattatttggttatttagttattggatttgcaacaattaataaatctattttaaatttagttattaaattattcccttatacaccattatggattattaaagcattagtttatcaaaattattgtggtggtgataatttaccacaagtattgaaaactggtgaaagattagctgagagaggtattcgtaatatgatgatttcttatacagttgaagcatgtgatggtaaacaaatgtctgttagtattgatacaattattgatgaaacaaagaaaagtattagtgaattgtttagctccacatactgaaaagatgattaaagaaaatttaattaatgcacaaaatgaaattgaaaaagttaaattaattaatgaagttccacctggttatgttgcattaaaaccaaccggtttaattgaaaatgcagctgaaattttattaaattacgaaaatccaaaatttcaagataaatttaatcaattagttaaaagttgtgaaagtatttgtgatattgcaattaatgaaaataatttattaaaagttaaatatcctcaacgtcaatcaccatttgttgttattgttattgatgctgaacgtaatgatttacaacaaggtgtttataagttacaaagagatttaatggctaaatataataaaggtatagcttatattgttggtacagttcaaatgtatttaaaggaatcttcaaatattttaaagattgataatgaacttgctcaaaagggtggttatgttttaggttggaaattagttcgtggtgcatatattcatacagaaccagatcgtaatgttattcatgatacaaaggaagatactgataaaaattatgatttaggtatttcaaatacaattgaaaatatgaatagtgaaaatccaactgttggtcatttagttgttgcaagtcataatggtgaaactcaattaaaggcaactgaaattttgaaaactttaggtgttaatgaaagagctgaaaaagttcgttcaaatgttgttttaggtcaattattaggtatggcagataatattacttatgatttaattaaaaatcataattcaaagaatattatcaaatatgttccttggggtccaccattagagacaaaggattaccttttaagaagattagaagaaaatggagatgcagttcgtgcagattctggtttcccacttgttaaaggtattttctctacttttatgaagaaactcttttaatcaattaatcaattcatccattcattttacccctttttgctaatatttaatgaaagctcttaatagttttcaaattttcacttctcctcctatattttatattaatattaatatttatttaatttattttaaaaccaattgtaacattttaacctctagatatagtctgtaaatatagataattacagaatgtaattataccaattaagaaaagaactataccaggcatgattaatcttaccgctctcatccttagcaagcttaccaagatcctctttactccaatcattgataacgtttaaagccaataattctactgaccatctaatagtagcttctctaactgcataaaaacaatcttcaccactaatataatgccctgaatgaatgtaacaccttttgtataaatcaaacgcagttccagtttcatgtactatcacagctgttaaaagcattacagcacgagttttagtgtataatctatttttaattaaatcaattatgttagttttatttttagttgttgttgttgatgtgtcagttgttgctgaagcataaatatcagctgaatcttcactatcacaactttcatcaacatcatcaacatcatcaacattgtttttacaccaaccacggataacatccatagcatataattcgacacaccatctaatagtagctcctttaattgcataaaaacaatcttcaccattaacatacctccctgaaagactgtaacatctctcgtacacatccaacaaagtacccgattcatatgctaccccagccgttaaaagcaatatagcttgaggtttagtcatgcatgacttttgttcaactatgccaatttcggtttcaatttcaacttcagtctcagatgttgatgtatcaatctcggttgttgctgaaacatctgcaaataccaaacttaataaacaaaatatggtaacaaggtaaagcttcaatgataattgcattacttaaatgaaagaagtagatttaaaatactgtattaatcaaatataagtggaattgatggtactcttgatgcttcaatgagataaataaggttttcgagattacgatgtaaaattctatatgataaaatataagagattatattcaacaatgaatttgttataaacagtgataaataccactcttcttaaacaataagtaaaagaacaaataggtatagttatatggttataaattgtagatctattgatgttatctatatgtagttaatgtaggaaaatcactaaactataacttttaaattcgtagtattttgatgttgatcaaaaatctatttcatttgattttctcattcttattactgctattattaaccaaatgatgaagtccacttcaataaatttgttcttattagtatcaattctattacaggaactctccttctaatcatattattttatatcatgatctagattcttgtattcttcaatataagttaaactggggttcaaatactgtttcttgttattatgctagcggttctaatactctttcttatcattattaatattactcttattattatagtagattgagttcattatcaaaacatgccatcttatctccgtgttcaggtgcatactttacattagacccacagtaattacttgatgtatttgttcaaaaaatcttggtggaaatcacttttcaatgtatcattagaaaatctatctttctctgacacaactttctctccgtattctttcttacttctacgccatgattttctaacaggttttgtgactttattatcttcattgtttattaatttctctttgtccttgaaatcttcaaactctatttgaagttgcttttcagtttcttgttcttgttcttcacgatttttctttaaaagttccatttcacgtaaaatttcatgttcctcctcatcatcttcatcactttcatcgccaccatcaccttcatcaccactaatattatcactaccactttcaatttctttgcgtaatgccaccacagtagttgactcaaccccttctatcttccttccatcaccggtatcttcatcattatcatcctcttctacttcctcttcttcgaattctgcatttttattagactttttcgatctaaactttaatttcgaatgtgatgcaagtgatctcttatgtgaaatggaagacacaacactcttctccttccccttggcatgatcaaacgttggtctagcagctgttgtcattgcctactctatacctttcctttataaaagaagctgtagcagattgtaatatttttttagttcgagattttcaataaatttattgcatcgatcgagaaaaggcttttatatataggagaagtcttttgacttaaagaaaggtttatatattattcagtagagtatattaatgtctatattagaagagaaagtgacacaggatatgactgatatagatggaaataaaagtgatggagaaggaatagataatacacaagatagtcaagatacagagtttataatcaatattaaggattatggatatgaaatttcagatcctagacattttggcatctatgatgacgacagtgaagaagaggttgaagaagtggatggagtaggaagatgaagaggatgaatattattatgatgaagaagaggaggttgatggaagttatggaaaatatacaacatttctggaatgttcacaactaaacatgatgaaaatgaattaggacgatatactgataatatggaacaattatcacattcaacgagtaatgtagtaacagatgatacatattttgcacaaggagatggtaataatgaaattttacatgcagttgcattatatcaatttgtacctgaaaattctaatgaattatcattagttcctgatcaattattaataattaattatgaatgtggtgatggttggttagttgcacatgatcctgaaactggtgaaactggtcttgttccaacagaatatattaaaatgttagaaggagaaccatcttttgatcaattagataacgcaacttataatgaatttgctgaggatgcaaaggatgctcatagatttatgcctgaattgttaggtaatgatgatgatgaaataccaacggataaattgaataatttaaatatatagtagagaatagagtattaaaggaaggaaagaaggaaaatgtccaagaatacacagtcaaataggacaatccagtgaagtataaatattattaatacatgtgtgttaaattagtgtctctaaatatgtgtaaagttagataataataataataataataacaataataataatagtaaaattgaatataaatattatacataaaagcaacttagttttcaggaatttcatcttcccaattattttcatcaattcctgaatcatctttctccttaagtaaaaatccaccaactttttcaagtaatgatttaatcgttgattgtaattcttcatcaatttgagccgcaagttctctatcatgtaatgatttaactgccgaacttaatgccaaacgtgatgcattaataaattcaaaacttttatcatcttcattaatatttttatttaatgtataattttcaaattctctaccaatatttatagaattttcctctgatatattgttttgtattcttattgcttctaaataattagagaaaccttcaacatacattgcctctacaccttcttcattaatatctcttgcagatgatgcaatatttgatgcaatttcaaacataccacattcaatagcatattttgccaatataattaatggttgatataattcaatatacatcatttcaacttcatcgggatcaatattattatttgatggattattagcaatatcctctaatgattgctttttcttttgaaataaatcccatgaaatattaatttcatttattgcatcttgtaatttttgttgagatatacgaacacttgcaattattgaatgtgtctcaggattatcaaaacacatatctgataatgttttactccatttttcacattcttcctcagcttgtggtaacatacataaatcagtcatccaaatttcaattatagctgaaataccttgtgttaatttactaatgatatattcacttatcttttcttcactaccatatgcttgtaataatattttaacaccttcatctaaattttcatcattattaatttctccagtacttaacgattgtaatatttgtgcttgtttaattaatcttgcaataccaacttctaataattgaacaccattctctccacctataatttgacccaaatggaaaaatttctcaattcctttatcagcaattggatcctaattcacatgctttggataaaactttaaatgcagattcaacatcacttgtttcaagatatgcttcacctaaagttgttaaaaataatggattttcagaatatgtctgttgataaccctttaaatcttccaatgctctctctggatcagttggtaataaaactgacgcacgatggattatatttaacaatgcactatcagacatcttcccctgtatgtatgtctataccaatacaattaaaaatcactacttaaaggtttttataatttaagtgaaaaataaaaaaaatatttttttttcactaagttaagcaatgttaactatgggaaactcaaaaatttcttccacagccaattcttcaactttagacattggacactggacacttcttttgcacaattcaactatggataacttagaggaacaacaacaggaattggaaatcttacagtccatttatccggatgaattggaagtgttatcttctaccagatttcaaatcaatatacttctagacactgaatctacaaggaaacatgcagtactgctagatgtcacatatcctgaaacatatcctgaaactgttccaatattgaatgttcttgaaggttatataggtggtgataatgatgatgatgatgaaagtagtgaagatgatgatagtgaagatgaagatgaagctaattatgatgaagatgatggtcaaactatgtcaaaaaaattattaaatttaattgaaacaattaaattagatagggatgattatgatatacttctacgaaaaattagagaagaagcagaggataatgttggtatgccaagtgtattttcattagcttcttcattaaaggatcatgccgagactcaatttatgaataaatttaaagaaagtgaaaagataatattagatgctagagaagctcgtgaacgtgaagaacaaaagaaatttactggtactaaagttacaactgaaagttttgctaaatggagagatagttttagaaaagaattaggtatagataaaagacttgatgaacgttatgcaggtgttcataagggtagattaacaggtaaacaaatctttgaacaaggtttggcttcaggtgaagaattagaggatacaactgatgcaaaggaatttgatatgtctgaattaaagaatagaatatcaggaatttctatttaaattataagttaattatatttaatattacaatttgttactagtatatacaaatccttacttatacatacttttcttttagtttaaacttaaattctgtactatttaataatcattataaacatgcttgaaattttcaacatcttcatcattaacaccaatatctatacctgtatccaatattctatcaatattgaaaacactatcgtgtacattctttttgacatcatcatctgcaaagtaaggtaatggtccacctgatgatgatttccaactatcatcatcaattattggaccaccatatttaaactgtgaaattacatctgcatatattttatcattggtataattatcttcactcttggatgctaataatgataaatatagattttcatatttgatacttttctggtaatcatttttattaattctttgttcctcatcgtctattaatgcttgtaaatactcatgtccctttgtagttaaatctatatttttcctatctactctttcatacttttcattaattttctcatctggaactatgaaaggttcatcaaaccatattctttcatgatatgtattatattcatttagttgattaaataaatcattattctcgtcttcactatctgattctaaatcatcaatattttctgcattttctataatttgagtaaagtattctaaattttcgtcatcggcatcatcttcctcatctccatcatcatcttctgaactatattcagttgtttcatcatcatcgtcttcttcaacattcttagctacattcattattacctgtttccaattccacaacatcatcctcttcatcatcctcttcttcatcattaacttctttatcatcataaatatcaccaaatgcttttacaaatagtctccttttataaagcttcttaccactgaaaaaatcatataactttttggaacctttataatctttacaaaattcagctattgctttttccatatcttcttcagttatgactaaaccatatggattacaggcatcaggtacagatacatgtcgtggatgcatataatcaagcatttttttcttctttcatgattaagacaggtaaataattatagttgtcataatcatcatcatcatcatcctcgtcatctccataatccttatttatgctaacaatgtcttcctttgtttttacatattgaatgtctaaattattggaatcaaaaatatgtatcatactattgatatccttaactggtttaaaatgttttttcaaaccgaaccatgaaagttcctgtgtatctgtaaatccattgattttatttattaataattgttgaattaattcacgaatgtaatcatagactaaattgtacaaatcaatagttatttgttcattcattttggtagaatctattccattgtaggctttattagctttattaatatcatttaatattggtaacatatcctgtatatgttccatattgaaaaacttctttatttccttcttaacagttttataattataacttttctcaaattcaggagtcattgcaaattgttgatcatctaatatttcaatactttgtgcaaattgatcctccatttcaatatatttctcactcatttcataaggccactggcatgtcttccaaactaattaatttatctttcaattgatcatctgatttatatcgtttcaattcctttgataataaattatataaattaacgacatcaattgttgatttttcaggcaacaaagcagagatatcatcagctcttgaaattccataccttgctaatgcttcataaaaaatgtctttctcctgacttgtccattttaatgaagatttgaactccgattcatcatttgcaaaataatcattattgacgtatataggttcatgtttaatatgtaaatcaaaggtttcaccaaatgcactatttaaatcgaaaaactcattgaattctttagttaataaattgaaatattgtaaactaacatcttgactactggcaattgaatattttttagcaaatgatactaatctttcagctaatgcattatccatctctctttcacccctaatagctccaaaatatatatggtttaacaaagtcaatcaacattctcctatactgtacagcagttttagaaacttcaacaatattcaatccaggtcccaatatttgtccaaacctgtcgatccattcggtgtaaatctatattcatctttgaacagtttcccatgttttaaactttattctattgatattcttagcaaattgagttttcgtctttttcatgaaataattcataattgataccaattgtccacttaaatcacaataataaaagtataccaacaagtggatcttttatcatattcaaacgtaattgataatcatcatcgtcatcaaattcaattggtttatattctatttcatctatattaattgtatctgtggatttttttatccttctcttacgattaggcaatgattcttcttctatttcatctcttggatgtattcccagcactgtagaatccccagaactgtcatccaccaccatttatatacactttttcttaatcaaaaaaactagtcttttaggattgaatacagatctctttttaaagatttgagaatttttttttcagtttccgtttcaacatgttgaaaaaaaattattaccggatttcttcactaagtgtaaagtataggtgttgttatatattaatcatacgggcaatacgatgttgggtcgttgtagagtattgggtagacacagaatacctgttactaggatttcaggaatttatatgtgaaaagatggaatgcaacgagtaatcctattccacatcctattgagaaacaaaaaaatgataatgttgaaggtgaaaattcagttattgaaccaatagaggatattaaggaatttattaaggaagaaaaaataattgaaagtaaaagtgaaatcaatgatgatgatgaaatactgaaagtgaatgaattcaaacatcgtcaagaaattaaaccacagttaatggatttaccatgggaagtaccaactaagaagagtgaagaaattgaggatgaaagtactaaaggtggattaccatgggaagttaaggaagataatgaggaaagtagtagtggtgttaataataatgaacatgttgaagaagcttttgatccatcaaaaaacgaattgattttagctccattaaagaagaaatcatcagtaattcaaaaattaaaaccacgtaagagtatttatgttaaagagacacaaaagaagaataacgagaatttaagtttaaatgctgaacgtaattataagaatttaatgcaatttaaattcaatgcaaatcatgatgattttattaaaataattgatgaattaaaaccagtaaataatattgttacaattaaacaattaactgatatttcaacaaatttagataaatcttttagagataaacaaattcgtgaatatttaacaactaaagtacctggtattatattaaggaaatctcatacaaaaagaaaaatgattaataaattaatatctgaatattggaaattaaaagttacattagatacaactgctgatttattatgtgagacaagaattgatttatctaataagagagatttgtttttactattaagtaataaaggattcttacctcaacattggtcattaattggtgcacaattatcattaggtaaaacaacaaatgaattatacgttaaaggatctaaaaatatagttaattttgtttctgcatcttggaatgatttattaaataatatatcaacagatcatattgatttaacaaagattaaagaaatatatagtaaagttggtaaaaagctagatattgaaacattacaaaataaatgtggagttcattttgataaagttacaatgaatgaaaataattatatattatcagctattaagaataattcaatatccgatgttaaaattgagttactgaaagctaccgaatatagacatggtagtaataatataattattaatgaattattggacggagctaaaattgaagatgaaaaattattatataagatggaaattaatgatgaaacattaccatggtatattaaacctgaaaattatttcaggtatgcaatggctaaaccaagaattaatcaaagtttattaaatgatgctaacgtatttacagatatattaagtaaagaagttcaagatttaaaagttgaagttgaacaagcaaaggagaaatttgagtataattatattcaaaatagtagtaataataaattcaaggaagttaataaatacgatgacaaatttttccgtattgaaagaggagatgatgtattattaaacaaagttgatgaagatttaaaactagataataaaacaattgagaaagaattgaataatgttaaatttaccaataaccctaaaagattaatgttagataatgttatcaatgttaaatttggtaaattattacacaatagagataataataatgattattattttaatgaaaatttacctgaatgtattagaaatttaagtaaattagaattaatggataaagaatcgagattatttggtgatacaggtggtatcatgaataaatttaataaacaattatatattaaattaatacctaatggattttggaaagatcaaatagataaatttattaaatatccaacagttgaattattgattgatttaaaggatggtaaattagaagttaataaattttctgcatttataagtgaattcgagaagaatattagtattaatttaccaaagttagatgttgacttaaaatttcaaaatagtttgaattctatgcttgtatataataaagatcaatggatattgaatggtagaaaagaggaagaatttgaaggagatgaagttaatgaaactaaggatgatatagagaaggagaataatgataataatattattaagaataagaagattattaatatgtttatatcacaagttggtaagggtagatttgatattaaaaggattgatggattacgaggggtaattagacaatttcaacataaaccatatttattttattttgataaagagaaagaaggtattaaatattgtgcaattgaagttgaatatttaaagagtattgaattagaatataagggatatccagtttcattaatattaaaagataatggagaaactgaaaaatttgaaatttcaatggttaaggaaggtaatgaagatatgagtaaatttatagacactagtttatcattagctacagtattatcacaataataatgtattatgtatataggatatttaatcttagatagaaaagattaagaataaagatataagataggagatataagataggagatataagataggagatagtcatgtaagtagtaaatgagtatcttaggaaggctcagcgtcatttttgcttttcttcttcatcatcatcatcgtcatcatcatcgtcatcatcatcatcttcttttgtttcttgcatttcattatttattagcatgttatatactcgttaaagcatgacagtgccggtaccgcctcgtagagaatatcactcaattagatacccgtatgtatatttctaccagcttttcaattttaacaagatttattactaaaaaaataatacatatgcctatagagagtttacttcgtttattgtgagtaagaaattataatattaacttctaatataatttagcaaaaaatacacaacagcactattgattttaacactattaattataaaaactcattatccaagtttatcttaactaactactcgcataccagttccatcgacattgattcgcatagtagacttccttacaaattataacaattataattctttattgtattgaaaagatccaacttaagattcattatttgatcacgtaatattttacgtacactatctacaatatcctcctaatgcttagcagtaaacaaaccttggaaagattttaaacatgaataatttcctgttattgatggtgatcttcatgcttttgatttccaaattttaaaacataaactaactccaggtatgaaggttaatcctaaaagtttgaattccgtaattcatcatgctgaaagttcgaccatatatactattataataaatacaggcctaattcctactttaagaattgtagttttattcagatagttagtgaggagagtatacactctcccgatgaaaggacggaaagagtaaagaatagccaagtaagataagttaaactataattataattatttgattcacatgtctataaagagggaacggtaataattgtaatgataagataaaaactagaaatagaaatagaactagaactagaactagagagagaacccgtcccatcgacgctaagaagataaaacagacgcgtctatccaatactatacattacgtaatacttataatacccttttttacatgccatttcaattccagtttttcaaatggaagttatttttaatttttagtattaaaataaattttggtgaacatcaccttaagggcttttgccacccatttcattctttacattattcttctactcctttctcttttacttcttttatcaagcaattgcctcaattacttaatattaaaacaatgtctactactttctttgatgtcgcagctaatggtcaaccattaggtagaattactttcaagctttatgcagatgttccaaagactgctgaaaatttcagagctttatgtactggtgaaaaaggtttcggttataaagattctatcttccatagagttatcccagatttcatgttacaaggtggtgattttactaactttaatggtactggtggtaaatctatctatggtgcaaaatttgctgatgaaaatttcattcatagacatactaaaccaggtcttttatcaatggcaaatgcaggtccaaatactaatggttctcaatttttcattacaactgttccatgtccttggttagatggtaaacatgttgtctttggtgaagttactgaaggtttagatgttgttaagaaaattgaatctcttggttcatcatctggtgcaactagaactgaaattaagatcactaattctggtgaattataaattacttaactatttaattatttaactatttaactatttaacactttatttaatttattttaataattaacacatgtggttaactcttttccatggtgacgtatttttcaattttaattttaattttccatttattacgcaatacattttaaaaaaagttaaaattgaaatttttcaccgttttccaacatgccatgattgaatcattactaagagtcattatatcaagaacatactcatcttattctattttctcatatacaaccatggatttagtaaatcatatgactgatagactgttatttgcagtcccaaagaaaggtagactttatgaaaaatgttataatatgcttaaaggtgcagatattcaatttaatagatcaaatagattagatattgctctttgtattaatttaccaattgcacttatatttttaccagctgctgatataccaactttcgttggtgaaggtagatgtgatattggtattacaggttatgatcaagttatggaaagtaatgttgatgttgaaatgggtatggatttatcatttggtaaatgtaaattacaaattcaagttcctcaaaatggtccttatcaaaatccaaatgatttaattggtaaaacaattgtttcatcatttactagtttaactagaaaatattttgaaaaattagaaggtgtccctgagggtggtaatttaaagactaaaattaaatttgttggtggttcagttgaagcttcatgtgctttaggtgttggtgatgcaattgttgatttagttgaatctggtgaaacaatgaaagcggcaggtttacatgcaattgaaacaattttagatacttcagctcatttaattctctctaaaaatccttcacatcctgaattattagaattaattcaatcaagatttgaaggtttattagctgcaaataaatatgttctttgtaattataatgctccaagggataaattacctgatttattaaaagttactccaggtagaagagctgcaactgtttctccattagaggatgataattgggttgctgtttcaagtatggttgaaagaaaagatattgcaattaaaatggatcaattaaagaaattaggtgcttctgatatacttactcttgaaattactaattgtagagtttaatttgttatataattattatattatctatattacatttatactatattatatttacatttaatattacattactttataaaacatacaataaatcagtatcaatatataagtagagattataggaaactctctgaaactaggcgcaacatgtttctatttttttttgatgaaggcaataatcctctacattacccaatactattttctttaaacaattgattgtaagtagacaatcactaggctaatgtcttcaccctttgacaatccatcttatttagcctcttcttcttcatctaattctacaaataatataattaatttccaaaattcttcaggtaatataaatcaaacaagatcaagagaacaaagttttaatcaatcaaatttagatagagattttgaagataatttagattttgctttaggtaatatagatcattcggaaaatccatttgtttataatagtaataataattcaattgataatatagattcttattcattgaaaagtttacgactatcgaattcccattcccattcaaattcacaaaacaacataattgatctaaatatgcagttaaaatcaaacaataaaaataataacaacatcaacaacaatggctacactgattacccctattcacagacaaattcatcaaattctttatggtcaaaaggtgttaaatcagtttataatacaacaaaaagattaattttaaataataatattaataaaaagaaaattcatttattagaaactaattcatcaaatgatgattcagaaattccaatttcttcattagaatctcaatcaagaacaattatacctcatatggattcaatattctcttcaaatgctgtttcaaatgcaaaatataatgcattctcattcttcccaattatattatatgaacaatttaaattcttctttaatttatatttcttattagttgcattatctcaaataatacctgctttaagaattggttatttatcatcatatgttgtaccattagcatttgttttgatcagttacaatgtctaaagaggcattagatgatataatgcgtcgtcatagagatagagaacaaaataatgaattatatgaagttttaggttcttcaaagccaattatggcaaaagatttaaaatgtggtgatttagttaaattacataaagattcaagaattccagctgatatgattttattacaatcaaatgaaagtacctggtgaatcatttattaaaactgatcaattagatggtgaaactgattggaaattaagaattgcttgttcattaactcaaaatttacctgaatcagaattaggaaatgattaaaattcaagctcaattcccaactaaagatattcataaatttttaggtaatattaaatatggtgataatacaattggtttaactgttgatcaaactttatgggcaaatacagttttagcttcaggtacttgtattggttgtattatttatactggtaaggatactaaacaagcattaaatacttctttaccaactgtcaaaacaggtttattagaattagaaattaatcaaatttctaaacttttatgtatttctgttttcatattgtcaattggtttagttgcttgtcaaggttttaaagatgattggtatattgatattatgagatttttaattttattttcaactattataccagtttctttaagagttaatttagatttaggtaaatcagtttatgcatatcaaattcaacatgatttaaatataccggatacaattgttagaacttcaacaatacctgaagatttaggtagaattgaatatttattaactgataaaactggtactttaacacaaaatgaaatggaaatgaaaaatttacatttaggtacaatttcatatactggtgaatcaatggatatcgttaaagattatataaataaatttggtgaaatttcatcaaaaccaacatcaagaagagatttaagtttaagagtacgtgatttaattttaactttagcaatttgtcataatgtaacaccaacaatcgaagataatatattagaatatcaagctgcatcacctgatgaagttgcaattgttaaatttactcataatatgggattatcattaattaaacgtgatagaaataatattgttttattacatgaagcaacaggtaaaacttttgaatatgaaatttatcaaattttcccatttaattcagatactaaaagaatgggtataattgcatatgataaatttaaggatgaaatttggtttcatgaaaagggtgcagatactgttatggcgaaaattgtctcacaaaatgattggttagaagaggagactagtaatatggcacgtgaaggtttaagaactttagttattggtagaaaaaaattaacaattaatacatataatgaatttaaaaatgcttatgaaaatgcaagtctatcaatgtcaaatagagatgttttaatgcaaaaaattattacgcaatatttagaatatgatttagaattattaggcttaacaggtgttgaagataaattacaaaatgacgttaaatcatcaattgaaaatttaagaaatgcaggtattaaaatttggatgcttacaggtgataaagttgaaactgctcgttgtattggtattagtacaaaattaatttcaagaggtcaatatgttcatacaattgaaaaattgaaaaattatgatattgcattacaacaaattgaaattttaagatcaaatataaattcatgtttattaattgatggtgaatcattatcaatttatctaaattatttcccaaatgaattttttgaaatttctaaaaaattacctgcagttattgcatgtagatgtacaccacaacaaaaggcagatgttgcaattttaattaaacaattaacaggtaaaagagtttgttgtattggtgatggtggtaatgatgttagtatgattcaatgtgcagatgttggtgttggtattgttggtaaagaaggtaaacaagcatcaattgcagcagatttttcaattacacaattttgtcatttaacaaaacttttactttggcatggtagaaattcttataagagaagtgcaaaactttcacaatttgttattcatcgtggtttgattatatcagtttgtcaagtcgtttattcaatttcttcaagtttcgaaccattagcattatatcaaggttggttaatggttggttatgcaacttgttatactatggcaccagttttctcactggttttagactatgatgttagtgaaaatttagttacattatacccggaattatataaagaattaactgaaggtaaatcattatcaatgaaaacattttttgtttggctgttcatttcaattttccaaggttgtgttattcaaggtatttcacaaagttttattggtttggaagttacggcatttacatcattagttgttttatcatttacagcattaatactaaatgagttagttatggttgcattagaaattaattcatggaataaatcaatgctttattctgaattaattacattggcaatttatattggtagtataccattcttatcagaatattttaatctggaatatgcatcaagtttctcattttattggcaatgtgcattaattttatcagttagtttgttaccaatctgggcagttaaagcaattaatcgtaaattacgtccaccaacatatgctaaagttcaacaagtttagtaaaaaaatctgtataataatatcattatcatttaattagttatatattctattctataaaaaatatttaacgacttctatttaaattgaccttgtttcactcatatcataatttacctctaaatcatcatcgtcatcatcaataattctatcagtattatcgttcactagattgagttcctctcttaaatcgtaattatcatcaatatcagatcctgtaatattaccattattattaatgtttttattttgatcacgttgttggaactcttttgcatgtgcacgagaaataatatgtgaaagttgttgccagcctgatgttctgatagctgaagttctttgagttgctgcactataaatactcatagcatcatcttgaatatcataattacctgatgtgcaaattgattctaaatcgatatttgagttattgttattattgattatatttgatggtgttaataatgcaattgtttcctctaactccattatattaatagttggtattgtaactttattacttaaaatttgtcgaattgatgtatttaatttcctttcaatatattcattaatatcctttgaattaattattttttgaatattagaaatataaggtaacggacaaacacgtgaaacacgaaataaattaacatttgatgcatgttcattctccattctgaaaaacatccaaataaatctacgtaataattcagcaattgcaacaaagaatgcagttaatggactatgtgaaatataatatggtgtgaaaacataaacaatccattgaaatcttaatactatatcaataaacatagcaaaataataaactggcttatgtttataaatcaagacatctcttaataaataattatctgacgataattgcattaatgaccaatccatgcaaatatcccaaaatgaactataagttgaattaataattgaaattaatatgaaaataactgttatcgtaatattggaagatttataattatatccatttatttgtcttaatgcttcatctttaaatgttgaaatacgataaagtgataaaaggaaaaaatatgatgtcgttattagatatttagctaagtttgcaaaatgtgggaaccactcacctgtatctaaaaaacgacgtaaacattgcattgatctccaaattggtggaatgcaggcacagatacctaaaatatgtgatttcattggtccacaagtaccacaatttgtccaatctacactttttagacaaaacatcatataaatattggcaattgaataagttaatgagcatgttacaactcccataaagaaatctctaaattcaacaggataaaatccactaagaaatagcctgaatattgaaacaataaaccatattcttgctttcaagtaaaaaacatttaatgggcagaaaagtattaccaataaggaataaaaataaatgtatggataataaataatatcaccaaatacatcactcatactccaatatgccataatacttccaataaataataaactggatggtataatgagaaattgtttataatctaatgcatcatgaggatttaattcgaaaactaatttgtaattgattttgtatttatcccaaacaacacaatttatagcaaatagcaaacctgctaaaacaaacaaaaaccaagacccccataattgtaaaacaaatttcatattaggatattcgttattccattttttgatattatctcaagaatgaaaaataataagaatggacatgaaataccaattaagtagccagatataaaatttgatctataatgagttttctggagttcaaatgaccttagttttgtgattgcggttttacgatgtccatcctcaaatttttcagtaaatagatcttcaatggattcaactagtttggaacaaaatatcagatttattaaagtacattgattcaactttgttagtatatgatgatagctttgaatcatggcattttttatcatatttcttaacaagttttctaaaagcagttttattgactattttatatgatcctaataactctatagaatgatataactcacaaattgcctttttaatcataattttggaaataaaaggtggtggaggaatgtaacttttgtcttttgttgatattgattcattttgactttcagtatcagattcagaatcttgaatttgcttatgattattccaaaaataattaggcatcgatggcatttcaaagtgattaaaataaattgaatacgtgcaagaatggatactgttgataatgggttattaaacttgattttttgaaaaaagctttttttgttaatttttttatgttgatgacagttttgatgattgtttgttgattcatccaatcctgtgctatttgatttggagattttggcttgctcattttccaactcctccagttgatccaacaaactaataaatcttttagtataatcaagttctttatttctgtaaaatgtatctactttcagaagttccacatcaacccagcttataaattgttgtttagcaagtttagtaatatccttattctcttctgataattcaggctgaggccctctcatatataatacactagttgaataagatctatgatgttgtcctacattatcattcccctttctagtaacagagtgtctccttaatagtggaacattttcattttcattatttttaggttttatcttaaagtcaacttggtcaactaatgaaacaactttataatcattattttcatcatcattatactccaaaccttcatcactatctaaatcagaccgagcgtcatcattatctttatctaatgaatcagtagatccataatcattccagatctgcctaaaattatttctctcctctataatggactctctattacccaactgataatctgacttaccatcaccaccttctcgtacaaatacactatgtgaatcattttctgctaattcagaagcatctaaagtaaaggggaacctcttaaagcagttttaggtgatttcccatcatgacattggcactcagacgatgtttctaaaaacacagtaagtttatttaatttatttttacccttattatagtccaaatactgtgatctccattctgaaacaagttgatgttccagaaagtctccaaatttcatcctatacctctataacctgtctttgatgggtatataaattaatatttgacattgaaaagaactacttagtagcataagataagaaaaatagcgggtttatttaagcaaccaaaaaattttcatcttgtgtgacccaatagttgtttaacaaaacagtcagaatactacaatacttatgcactacctgttatttaacaacaatatatacctttgaaacattatcaacactagtctacaccaaacacagacttctacggagcaataaatacaccaactccgagagatgggcccctatttccatactaaatggaaacaaaagaagacgttgacgtcccccacatgatgtcaccgcacagcccgaagcgtcacttttttttatttctatttctatttctattttcttatcttatcttatagggtatatttatacagtattagagtttatacaaagttaattatcacggttgttatcatcagcttcctcttctccatcgtccttcttcttcaacttgcttttgattctttgtgactttccttctttgaaaatctttgatatgcgcagttctcatactttgtgataacttcttagcaaatcttgtcagtgataaaactacaccactagtgtatgccatatcaccatcatgtttatctccactaccaccaccaccgccactctctatatcatctgtaatattttgaccttcattattgactaaaacagttggtatgtaacttgcaggtacttgtgatgtttcaattatttctatattgtacattttgatgttctgcatgtttagataatgcaggatttgtaatattaataccatttcttcttctaatattttgatctgtaatatcttgcacttatatcattatcaccactttcttgatgctgtatggtatttttacgttttttagttggatatggtaatggtgattctcttgatgctctaaataaatgaacattagttgcatgttcattctccatacggaaaaatatccagacaaatcttcttaaaacttctgaaattgcaatacaaaatgatgtaattgcactttgttgaatttgctttggaaataaaacatagaatacccattgaaatctaagaataatatcaataattattgcccaatagtaaatttcaggttttttaaatgtaatttcatctcttaataaaaaatgtttagaatcaaattgaaataatgaccaatccattacaatatcccaaatagttgagtaaattgaattaaatgatgcccaaaatatcaaaagaattttatatttactaattgtttcaattctgtacaatgataatgacatataatataatgttgaaacactatatttacccatatttgctaaatgtggaaaccaatcccctgtatcagcataacgtctaaaacattgtaaaaatctccaaatagatggaacacattgtaaaaatcccagtagtctagactcagatgatccacatttaacacaattattccaatggttaccgtatatacagaaaaacatcgaaacatttgaaatagagtatgttaaagaacagaaaatatcacccaagaaaaagtctttaaattcaacaggataaaatccacttaataactaatcttgtaaatgttgataaaagccataatctagcatttaagaaaaacatatcgaatggacacagcaaaattgccatactgactgctaagaataaccatggaaaatcatatccactgaaagtgttaggccagaaatcatgaaagctcgaccatgcaattatccctccaaaaaagaaaagtaaacttggcaataccatatattgtttgaaatctaatgtatcatgttgattaaattcaaatataaatttatagttgactttatacttagtccacactaaacaattaattgagaaaagccatgccattaacaacattacaaaaaaaccaccccaaatcttgtaataagtatttcccattgatgaaataaccggtctgtgttctatgaatacccacaacaaatgctaatatgacaaaaggaatagcaatacctaagaataaacccgagaaataatcagaaacatagtaagtcttttcaactgcacttgttcttaattttgcaatagaaacttttctattaccgttttcaaaatatcttgtatacagttcttcaacatttgtcattaaattatccaatgtctcagatttactgaaataagagtcatcaatttttttcatataggtatttaacaaggaatcttttgtagttttatcatattttttgatcaattttctgaatgcaattctattcattaatttataggattttaaaagttccattgatctgtataactcataaactgcctttttaatcattctgcgagcaacaaaatatggaacaacggaaggtttctcttccttttttctttggaaatctctaacatgcgcattagatgatgtggtacgtccatgtggatgtgccatgattattatcaccatcctcattatcttcatcatttgaaaaataaccttcttcataatattgtttttctattttaccaccgtttttcagccattcaaaagctgggagtgatggcatgtcaaatttattaacgattcttaatttccttcttgtccaaaatgaaagtaattggaaattacgctgtgctgaatttataacaccattattaagtgtagccatgtttgaatttaagtaatcctcatagatattatcatcgtcatcttcatcatcttcatcatcttcgtcgtcgtcttcatcctcctcatcatctatatcataatcatcaacagaattcctatcacctatttaaactcatattgggtgaaagattgccgtttgtgctttgtaaacgccttttccgttgttgccatttctttttggacaatgccttttgattttctaattgaaacacttgatcttgtaaaactaaatatctttcaacacaagatttttcacgttcttcataaaaactttcaattttagttcaattcactatccacccattcaataaatttctgtcttgcataaggttgataaatcttccagttctgtatcattatcactttcataagaaaatgatcgattccttctaaatgaatcaaacaatccaattaccgatgatcgacgcttgcgatgccgataagtttgaattattgctatgtggtgtagataatcttgactttgaacctaggagttctggtatttgtatcattaactcctaataatggagtcatatcgtgagaagggatattagcaagggaatgatgtgtcgaaattttaggtgactccaaagagttagacccatatgattgtccattataatctaaagctgccccaggtaatgcaaatgaggtattgctatctagcgtaagttgatcttcaattgcattcgttttcactattgactaacgatttatcattattattctcatcttcatcatcatcctcagcaacaacatttaaagaggttccaattattggagttttacctagtttaggagtagtgttactagttctatctaacgggcttgcattgctacttttccttgatcttgccttcgaacttgcctgtgattttaaggatcggagttgacttcaaactattcaatacactaggtttctgtcctaacttttttaacttttttttcccagctttgtaatcaagatattgagctttccattcgggaaccatatgggcctctaaagattgaccaaacttcattgttaattgctatagttgttaatgaattggcaatggaatggtaaagaaaaattaaaaatagtttaagtttgatgatctcaattaacactggagaaaaattaatccccccatgcacataaaagttaattgattagaatgtattcttctttattgcaattgaagattactctttaacaggatcaaagatgtcatcatttaggttatttatttgaataatatatggagtagagtgatatgttataataaaaatacaatgattaaatgccgtacggtatactatatagcttatagagtgattaaaaagttggacatagtatattaacatttcattcggatataatcggttataaagaaagtattcaaatattttttttgtttttttgttaaattaaatacagataaatagatattaaaaaagagataaataaggaaattaaaaaagtaaatcaaaaaggaaaataaaaaaagtaaatcagaaaggtgaattaaatagaattgttaataaatcattaaattggaaagtcaagttgtagaaagcatcaaatggttggttagttggttggtagattgagtaactagctgaactaaaactcagcttgtttataataataaccaatttgttgttttggttttggtggattttcttttaaacgttgttgaagtttattataatcatcaaattcagttcttgttaaatgtgcttggaaaggtttataatgggtatataattcatcaattttttccaatgtaagattttcagtttctggaaccattaataaaacaaaaatcattgctgcaaatgttgcaccaaagaaaatataaccataactaaatcttaaacgtgaaacaattgctggtgtaaagaatgcaattaagaaaccccaaatccaatttgctgcagttgctaatgccatacccttagatctgactcttaatggataagtttctgaaacaacaacaaaaacaccaggtgcccatgtaattgcgaaaaccataataaacatacatgtacaccaaaccattgcaccaccaacttgttgatcaactgcttgatcataaccctttggataaagaacagttgaaccaattgaagcaaaaactaaaagacataatgccattgcagctgcaccaaagattaaattatctcttctaccaattttaccaacactgtataatgcaataaatgttgataaaaagttaaccatacctaaaatgattgatgtaacaaatgaatcttctaatccaatagatttgaaaatagatgtaccataatagaagaaataattattacctgttaattgttggaatgattgtaatgcaacaccaataataactctggtaagaatttgagattcaccatcattagagaataattctttccatgatgcttcaccagcttttctttgttcaataattgaagtttcaatttctttaaaatcattaacaacaatatcatcttcaacatcacaattattgattcttgcaagtgaaactttagcttctggaattctgttatgttcaactaaaaatcttgctgattcaggtaaaaataacataccaacaatcatgaaaattgcccatgcaaaacataaacctaatggaattctccattgtctagtatcagtgaaactatggacagtaccaaaagttgtaacataaccaagtaagatacctaaagtaatcattaattgataacatgaaactaaaacacctctaatttcagatggagaagtttcagcaataaacattggtgataaaactgagactgcaccaactgctaaaccagaaacaattctaccaaccatatattgaatccaatgaaatgaagaaatttgtaaaacaataccaacaatataaacaaccataacagacattaaaccaatttttctaccataagtatcaccaagttttgctaaagtgacaccaccaattgcacaaccaatattgaaaattgaaataattaaaccaactctagtattagagaattcatattcattagttaataaatttaattcaccaaatctttctttaaaattagacatttgaacaaatccagaaatggtaccagtatcccaaccgaaaacaaaaccaccaaaggcaactaataaacataaaagtgaaacaagagagtgtttctttaaaagaccaaataatttatttttaccattttcctcaacagattcattttctgttgaaattgtaacttgatcattattttcttcctgatcatgtgctctatgttttttatgatgttttttatgtttttgtttagtgccttgttcagcaatttcaggatgatctgaaagttcagttgaacttggaacaattgatgaaactgaagattcagaagttgaagattttgatgatgatacttcatggtaagttgaaataacgttaagagtggtatcattaactgaaatatttttttctgaaacagaagaagctaaggaagctgattcagcagtagacattgtttgaaaaaattaaattaaagaaaataaacttgttgcttgagtttaagttttgattgaaggcaagagtagagttgacttagtcttgcgaaatggaaagcgtttgctataataaaggaaaagaaactaataagtatgaaaggaacaagaagaacaggaagaagaacgtgaagagaagaagaaaacttaattttctaaaagttggaaagttgatctccttttatagacttttgaatttacaggacagatccatatgactgtgatcttctcatatattgatccactacttgattacctttgatcactcattaaccataaaattatagtacagaacaccaaagtagaaggtcatacttacctaatcgggaaataattctgtatttttttatgttgagagactgcgccacgcgcatttgcctatataaaatgggaaccgcaccgccgctgtactgtgatttaagtcatttcagtcatttaagtagtcatcaaagtaaaacagatcaaagcaaatagtaagaacaagaggtaaaatcaatcggatgctttataattacctttatacagtctataataagtatgtaaaatatataaatttaacgttcaatgatgttttgttgaagcaaatcttcaaattgtctaatttcttctgcacgcatagtattttgcatgataccatttgaaatttgattatcatcaatgtagttgtagatagtggtaccaatagaaggaggtaagacatcgaattcataaactgagttatcagaccaaaaggattcgggtattttagccataactgtagattcaccagacaaaactgcatgtcttaaaatattttctggtatttcttcaagattgttccagtaatatgaacctaagttaggtttaccaacttttgtaataattgaacttaattcagtaactaagaaatttctaacttcttgatcttcacatagtgaatcaagtcttgttaagtaaattgctgtaattaatttaacagtatcattaacatcctctaataaccatggatgatcaaaattacttaatttttccaaaatactatgacctgtatatgagtgtctattatatgcacttagtaaagcatctttggctttctgtcttttacccaatttcaaataacacaatgcagcagtatattgtaaaggtgcagttaaccaagcttcataacatcgacataatggtgattcaacaaggtcaatcagatattggtattcttcagctaaaaatgcataataatcaatgaaaaatcttacaccatatggatcatcagcaggatcaaatgaaaataataatttacagtaagttaaagctgtatagtagatagatttttgtgtaaggacagaaatatatctaaatatcgtcaaatatatttgtctattgaggaagtattcaaatggtaatcttgatttaccatttcctaattcaaatgtattaggtaaactccaatcaaatacaaacaatgctctttctattaacccattagtgttagagttatcaccttgtctttgtaaaatacacgctacctgtaaaatagtttcaatactatatggagatttttgaagtaaacggatcaaagattcatgatctggttgaacaacaactgacataaaaaattcagtggttgcagcaagtgaaaatgtaggacctggtgtgatattatagtatcttaaaccatacttatattctttctttatatcttctaaaataatctctttccaatcatctttgaattttgttgaatttaaaccagcaagatcacttttagacatttcttccatggataatggttttttaggtattggtaaccaatcatctttgattttagttaatttcaattttctggtagttccaggaattgaacgatgatctctaccagaccagccacgtatacgtttggcaagttttttaatttgtgataacatttcaggactgattgaacttgaagaagttgaatcagcagcatcaattgcagcagctgataatttaccgaataaattttcatattctctatcagggtttaaatctcttgaatcaaaggatagtaaatgtgaggatctatgaaatttctttggtgttaataatttaccaccatgtgtgtatattggccaaggaggtaattgttcttcattactatcatcatcatcaatatcagaaccatcatcattatcagaaaaatcacttaaattattgatatcattttctttacttgatttcaattctaattctctcattttatcttcaagttttgcatcagcaagaattttatccaattcattatcatcaatatcatcaacagttttagaattttgagttttattaaatttaacttgtttctttgaattagatttagtgttattaacaggtggagttacagatttttcttcatcatcttctgaactttcaaaatcttcaccagaatcttctgaatcatcatcgtcgtcttcgtttaagaatgcaaatgcattagttggtctagattgaactatttcttcctcagattcttcatctgatgagtctgaattagtttgaacaacagactttttttggtactttgctaattcattctctaaagtgctcttcccaagtttcctcaaagctctagaactcatctcttatgtctaatgaatagttacgaaagtaaactacttatacaatctcttcttattcctttgactcaacagagactgtcgctgagtgtaaacctctttttatagaagattacgtaatatcttgtgataataaaaagtattaaaggttaatacatgatcttttagtttaggatagaatatattgtatggtataagttttataaagcaatagaagattaaattgaaattgaagcaaagaataataaattttgaaaaaatagtttaaaaaagaaagagtcttagactctataattgtctaccaatactgtcatgagacaacgttttaaaatgataagcttcagttgaggtacaatcagtattcggatttgaaacttcaccatttggaccgtatatccaacaagcattttctgttatacatttaccaccagtgcaaccacattctgaacgtttaccgacaatctcttctttatcattaagtatgagagatggatgacgtgctggaattgccggtctctttggaattggttcacttggaatgtaaatgttttgtttaatgtatgcaattctttcactttccatggttgactatttgatagttattcttgtagagaaagaaagatgataatatagatgaagaaactaatcaaagaagtgtataacagagcctttatttatatattgagaaataggtttgactcccttaagtattgatctatttcaaaataattaaatatatgatatttcaagaaatgtaatgcccttaaataaataaatgagatcaaatggtatatctgactcatttcaaccattaaagtctagtattgtctgccataagcgccttaactaaggaaagataatacctagataaggaattcccgccaaaaattccgtgtgttacagccgtgcaatgtactaataaataaatcagatgagcctttttctcatttccaccattctatctctctgtacatggcactgacagacaccggatattgcaattgctgcatcacagtatacgtctccccctgaaaagctagagccgtcaacactattataattattattattggataatttacgacgcttacttgatggttcctcattaatcacgtcattcatatcatagccactatcatctgcacttagcatactcatattattcacctcatctggacgttcctgtgcaaaattttcaatacctttattccatagaacgccagctagccattcaagttccgaatcttttacttggttatcttcattatgatcaaccatttttcttgtatcttcgattttcttttgaaatgttagaatgtaatcaattaccttttgttggaaatatttctcttcaagtaatgaataattgaccagtaaataaatccatttaaatatcattctttcactgacttgaaattcttctttaaaccccctttcatacataattgtgtcagataacattgctatttgatcatagtctactgatgtaaaattgcgttgggatttattgtataccatttccatcaaattatcaagttgtccattattcatttcaatatctacaaaatcttcctctactgaaactgttaattgtttcactcgtttaatcacatctttccataattttctccgtataagactttcattaattattaaatgatgttgaaatattatttctctatcaatatcttcatattcacttaaaacggcaatttgttgaatattatcatcataaatttttttccacttctggtttatgtcatgcatactagtgtcagatttatcatatccttcaattatctctctctcacatattccactgaatataatagctttactttgccatttataatagttttcttgattttccttttttaacaattttatcaacctaatgacacttgagaatagtttaaccccattaatatcaaatatttcgttttcaactaataaaacaccataattataacatatacttgcaaaccattcacaatcattttgcatttcactataatcaatttttgattcattttctttagcatactttatgaactggttaattgacttaatcatcatatcaacactttcgtcacaatttttaatatcattatcaattgttttaccataaatataaacacttgaccttaaagctaccaaaaataatgggttatcagtagtagtacccatagcatcacatttaattaacattttttcaattgcacaatttaatggtttatttacttctttgttatgtccatttgtattatctttactttcaatgacacatagagccaataaatttattgattttggatcttcactatcacataattctgttaaaatttttagtgcctctccattgctatcatccttttggttttccattttcaaagtttgaacaaatttataatatagagtgattgcattttttttattgaattttgataacctgttaaagatattattgaacttatcaagttcttcaacttttaaacaacattgtagcatactacgttcaatttttccaaaaatttcatcattttgttcactttgatcattattaactttcaaaattctactaaagcaacattcaaaccattccaaagcttcattataatcttcttctttcatttttttcttgcccatactccaaagcagtataactaagcagtttttggtctccttagttaattcaaaaactattttcttgtcaccaatttctaaaatattttcgacaatattcaacttctctttagtactttcaatcttaagttgtgacgttaccatccaaattgaagaaatcaaataattttcaataacttcattatattcagtatctgaaaatttaagtttattagtgaaaacatataataaacaattcttagcgattgtaggctgtttagatgaataagaattcaaaagcattctaattttctgtaagattttcaagtttgatggtaaagatattataaatttcatcataatctcttctatttcactcacattcaaagattgatattctagtaactcaagttgtagtttgaaggattcaactttttcagtttcttgcatctgtaagaatttgattaatttattagccttttcaatagactccttcgtatccaatttaatgcaacactttgttaaaattgttaatgtagaaacttttattttatattcaggtccactttctttgatttcatcaaccattttttctataactaaataacatcgttcaagaaaataatatgaatcgtgatattttccctgttgatataattgtaacccatcattgaataaaattctacagatgttgaaaacattttctactttcatttttacacaattatcaaccacatttgccttgttttcataaaatttggccattgtgatattgttcaaaaggaaggcactttgcatatccaaaataagaaactccatttttaaaccattcaatatcttttcatcttcatcatttaagttacaggtctcaataaatggaataatcttttccacatactctttaacttgctttccaacattgagatcctttaaatcaatacactcatagtaagttctaaacaaacattttaatgttccaattttacctaaattaccgacattcatcatagtatagattgagagtaatagacaaacaaaatatttcattttcatcactattgtgtaaaatccatctttccatgaataactttctttttcacattctttcattttcaaatcaactacattccatacagataatgatgatttttccaataaatgtaactttttggaaatacttgaatgaacagtttcatcctttaatttaattactggcacatagtcaatccttacgcatttttccgtggattcaagaactggtgttaatgtatccaatcttgtaccaatacacgataattcaaaagttgcatcgttgtttaccgttatattttcaagtatttgaaatgtggtatcacaaaatcctgtattttagagttagttaatgagttccaattgaaaataaaattagaaaaaaaaattctgggtcagtacaaaccaatcatctctgtgattgtagaaacaatctccacgtatatatccatgtctttggtctttgaagaagaagatgaagtaaatcaacattaatgatggcaaaaggaaaaataatgagccgcattttttcttgcacgtaatagtggcgagtaattaaatattgggcacctacagatttttcttttaataatttacgatttttgttttctaagatagttataaaacatagatgattatacaattaaagataaagtataccgttaagattggatcatttcttcttcaatgcttccttcataccaattaaacgtgtaacaccaggcatccattctccacattcattagtaaattctgctttaaattcttcacttaaacttttagccttagcaccattttcatcgactaaagcagtaacaatttcatttaatttagcaatacctgattgtgataacagatcgcccgcttgtaaatgtttaataagaatattaactctcttttcagtatcaataacttgtttttcaaatttttgtgggatctttggtttaactttttcaatttcacttaataatgtagaaccaatagattgaacaaatgctaaatcaactgaatcagcttgtggggttgctaatacagcagctgatgtaagagtttgatctgggaaaacaccttgagcgttagttggagttgttattggtaattcctcttgtggtttgttaaatgctggtggtgcttgagaacttcttcttggcggtggtggagcagatgagaatgatccttgtggtttaccataatttggtggaggtggtgcaacattggcattaaatgaattggctgatggtgggaactggaattgttgtggttgttgttgtaatgcttgtggttgtggttgtggttggtattgggaagtttctggtaaatagttattgttagcttttggagcatatggatttttaattactggttttggtggaactgatttattcatagaacctgggagcggtgatgctattctactcattggagattgaggacgtggaatagttggaggatggaatgcttctggttttggtgcatatggattcttattagttgctgcaattcttggtgtggttggtaaagatgattgtgatgaacttgagttttgatcatagacattcttacttggaggtgttggcatagctggtgcttgtgatataactcttgtacctgattgactacgattatgtgctagtggaaattcatttgatgcatttaaagctttaatttgtttatcttggaattgttgaatattagcagctggtgttggcttaactacaggagctaaatgagttggtaaatcattccatccacccatatcttttcttaatgaaggtggtaaaatattttccttctttgtttcaaaactatttgatggtgaaaaagctggttgctttaatgaatctagtgctgtttttggtgcatatggattagcagatgctgccaggttagtgttggatgtatttggtgaaataagattagttggctggtatggattagctggagcttggaatgagttaatttgtggttggtatgggttataagatggagcagcagcactaacaggtgtttgatatgattgttgttgttgaatattagtggtagatggtgatgctgcaattgagtttgttctattggatgatggtggcggtgggacaattgagtttgatctaacaggtggagcttgtgctaatggagctgaattcaaagatggggaagttgctggtaaaacatatggattcctttttgctgcatatttgttagatgctttggatgtcgaaacaacagatggttgatcttgttgctgttgcacaggttgagaaacttgttgagaagcaaaatctggagctgaagtttgaggaaggacatatttggaaacagatggttttttaacatttgaaatattagaaatattggtagtaacattatttgaaacattttgaatgaaggcttttgaaattctatttttttcaattttaatttctggaattgaatcggaaaccatgtttaataatttataagctaattcataatgaccgtagttaactaaggagtcggcatattcaacaaaaatcttacctaattcagatgaatcacttgataattcaaatttagaagttgattggaaaatgacaatcttttcaataacttcacctaatgctttaaatcttgcttcaaatgcagtatttttagaaccatcatcattattagttgataaataatatgattcatatttagataattcagataaccaaatttgtgagactttatctaatgaatcagatgcaataaaacaagataatgcaaaatctctcttattctctaattcagagtttaataatctatcaccaagtaatctcatttctgaattgaaagatgctttaccagttgagaatgtaataattgaatttgcaatatttttccatgattcaatattagcattcttaacaatgtcattaattgatttattacttgcactgtataataatctggaaaatgaatttttatctgcaaatttttggaaaaatgcattcttaaccttattttttaatgcatcagatgaatctaaggaaatgattaaagcttccataatacgatctttttgtatacataagtcaattaaactttcagttttgttagtcaataataaatcaatagcagatttttcaaaatcatcatctttatctttaacatcaatttcaaattcaccttctggaatatattccttaacatcagcagttgtgagagttgatttattaccattgcttatttgattgaagaaatcatcatcatcaataatttcagaatctgcagcaggtgaaattggagaatcggatggagttgtttcctctttttctaaatctaataatgagtcaactgtaccatttgataataatttttttaacaaagtccaatctttagaatcatttgccttggaaaaggttgataattttaattcgcataaaggtttgaaatctttagttgcaatagctgaaactaattccttagctgatgtatcaattgatttatcgttatttgcaattttaacaactttaatatcatttttatttgcaattgctaatttaccaccataaccaaattgagctgaaattggtctctttaaccaaattggagcttgattaactttgaaaacaggtttttgagtttctgttgttgaaatttgattccagaaatcattttcattttcagttttaacatcaattgatattggtccagctgtatcttgtaatgattgaataactaattttttagataatgaagcagaagcaaagatttcaggaatctttggagcaaatttagtttgatgaatccagtttggtaatgaaggataagaagctaattgaataccttcaattggattccaaagtaaagttgaatcatccttaccagaagataataataaattaggatcatcgagacaccaatcgatggataaaataccctttttatgacctttaaggattttttcaggagcacttgaatttcttaaatcccaagttaaaatgacaggttcactatcattatctgaagcagtaactaatttagtactttgagttggatgccattgaatagtagaaaggttaatatttgaataattcaattgtaagacttctcttttaacttttaaatcccaaatggaaccataaccattatcaccagctgtaccaaagatatgtgccatattattattccaagcgagtgaagaaactttacccattggagaaattgcttgacctggagtaatagctgtatgtttaacagtatcccaaataaagatttcaccctttgaagcagatgaggctaagatatgagattgtaaaggattaaatttaacttgtaaaactggagttgtatgttttgtatattcttcaattctagcatttattaaatcttgtggcttttcatttaatattttattagtatcgtataattgaatagttgaattttccaaaccacaagctaagatagaagtatctttaccattattccaatcaattgaggagaatttaccacttgttgatgcagtatagattggttcattacttttgtcatcaccacttaaaggagaatagatcgataaatgtgaatctgatgagaacgtatcatccataacaccagagagtgtaccagtggcaagcattggaacagagtcatgagaccatgcaaacaaagcagtctcattaatttcattaagcttgaccatgatcaattgctgtttaagttagtgaattaaaggagataatagtaaatatacaaataaaagaccctacaaagagaccacttgtgttattcttagattcccaaaatgaaagaattcgacaacacatcactcaaattcattaattatgatgcgcgaaagttgtgatttttttgagactatcctcagtttctcagttttcctgtttaatgatgatcttgttcaatgtcttttgtaatgatttcttccatggagtgacccaatcgtgcctacaacatcttaataccagtgtagtctgtttatctgtggagattatattgatattgaaagtatcactaggttgatcaaaccacatggctttaatcttggattctttaacttgtcctagattagatatctctatggatgcattttccattttagaaaacctttcatcggtatattgtttcatatctataccttctaaagatgaaatgtaatattcggatattggtgcatgtgtatgaatatatgtattaatgtattcaacacatggccaattaatttcctttaaatttattaatgaatcaagtttattaatattaggtaacttcactccaattgaactaacaaagagaccgaatttgaaactggtggtttctggatgattttcattttggatctttccacgaatatcaactgggattgctgtttcaatatcctttgttggtaaaaattcctttacactcaaattagaaagaagaactaatagtgatgtcagtttgacattatgatctctgcataatttcaataatgtagccatttcatcattatcgactgtaacgatttcacaatcacttaccttcgtaataccattttgacattctatagttgtcaaatttccattctccattagatctttatatggagattcgatttctggtataacaaaaccttctggtgctttgtaattaataaattcatcaggtgcaggaaatacaattgagtttgatgatctcttgaacaacattcgatcatactcaccttcattatctaataattttgataactcaacttgaaagtttttagtagagaccccatcaaaaaataaatgatcacaaagtaataaaatatatttgctattaataactttcaattcccaagtaacgctattttcatcgtaggtgaaatactttttatgatataagttaagtatcgattcaattgattcttcttcaaccgtcacaaattcaacaacattatcaaataatatttcattaacgattgtagctttgggactttttccgtccacagacatcactaaaattggatatttttcaatcaataaacgtaaagccacacataattgtgttttattaacaggtttttcatactctgctaaaatacgtacgttactgtagtatctattgatggtcttatagtagaaaaactgttcaaactgagaaagatctctcattgatttctctttaagaacgtaaaacttccttaattactaataagttgcaaaattgacaatcaaaaattatgtcacatcaaaaactgaaaaattcgtaatcaaaattatacactgattagctctttatcatgtatatatctttcttattaactaatcaaacaccaaatttacccctatatactatcaatgaaaccggaagataataaaccagcgattcaagaagatgattcagatgcgccagatccatgggataaacgaatatcagatactggatgttttgaagagaatcaagcattacaaatttgtcattatgatacaggtgattggcgtcaatgtttgaaagaaatgcaagcatttcgtgattgttggaagaagttcaataatgatacccgtgtgcatactgttgataattaaaggaagtttttacttaattaagtattttttaatggttaattctattttactgtatatagtttaaggatattcttagcccatagtggcttattctaaaatactttgcatgattgataatcgttgctttactaggcatgtatacatctgaaactcttagtgtttgagatgattcaaatcagaataaaatcattacgtaattgtataaaatttcctaattaggtaccagtacaaaccagcttcaccaattgtcaacattaaaactcttcaaccagcttctttccttcacttgcttatacaagatggatcttctggcacgtagagaggaggcattacaacgtgcccgaactgtatggaaagatcttattgaaaaatatgaacatgcaggacccagcgatgttgttgatttacgtactggagaagttgtaattgatagaggtcatttacgttcattgaaaaatgaaggacatacattagttcaaagtatgatagacaatgagaaaaatccagctgaaaaacaacaaccaactaagaaagtaatacctgtaataacgatagattcacctacgaaacctaataatgtatcaggaagacctctaacaagatcgagtgttgcaggtcatgataatttagttttgagtccaccattattcaaaaatcataaacaaaataaacaatcacatataacttcaagtcctcgacccgttgatgatcatgaagatccactgaatatattatctaagaatgtacgattgaacaatccatcaaaggttcgtagatataagaaagctatttcacgaatatcgccaaggagaagtcgaattcactcacttttgagaaaatctaaacatgttccaaattaacgtgttttctttaattttattttattttcttaattttgtttatattatgtattctttgctttgatttaatttaattgtataacagtttgtatattacaataatgagtaacaaaaaagatactctagaagatttaattgctgaaagagatcaattgattgagaaaagaaataaattggagaaagtttcacagtttttacgtgttccagtacatccagattctgcatctttattatctaaatattcaaaattaccttcattagatatagagaaacgtatacaatatagcaagttaacatgtcctggaatggagatagtatcatgtaagaaggaaagaactgatacaaaacttgacatggatatatgtttaaaatttttaaattctggaacttataatatacatctttcgattaatgcaattagccattgggttaaaagtttacaaatatctccttgtgctgaaatagtaccatattcatatacaataacaaaacttattgaagaatcagttagtactagaaatgtttcactattcgtatctacaatgaattcaatactacgaatgaaacataaaattatccatacattcaatgaaattttccaaaatctaccatctggtgtaggaagttgataattctaatggattttttgaaccaatattgtttaaattaccatcatcaattacattatcaatacattggctattaattattgaaaataaagaaattttctgtaaatctgatttcaaggtaatgacaatcaaaggatctaaaaatttctgatatttcaacagttttcaaagatttattatcagtgaatgatgttaaagttgcaacattacaattattagaaattttatagaaaagctagaaaaaacaaacacatatacaaacacgaattatctatattgcatttcaacaccagctcttgaaaatccacatttttcataaaacccaacatttttttcatcacaatctaaaataactttataacaaccattttctattgccagattagtcagatattttaacattgataatccgattttagaacctctcattgatttatcaactgcaacatcttcaacatgaccaacttttgaaaatccatgaattaatttagtttcaataagtaatgtactaataccaacaatttcaccatttggatctttgatagttatagtaatatgtttatcactctgttcactaacatatgtttcaaatgattctttactaacttctccgacaactgttaattgttcaagtacacgtaatgcacctttatcataatcttcatttgttattctttgtaaagtaaaaccttcgggcagtggcggtatactctgttcaacgagcataatttgtgtataagtatgtgtctagttttgtttatagatattaagaaaactaaaaagaaaagtataagtatagaaagaaagttatgtttcatgaaggattataataattattaaaaggcatttttctcgatgtttgcaattaacccaatcaggcaattttcaaatggatctgacataaagtttataatcttgaacttattttcgtgtaatatcctattcttatcttaatattttcttattattatgctttattttgttctatataaaatacaaaaaggtttttatgtacattgtaatgtaatcttaaggtttcgattgaattaattaggttcaacattatatttcattgaaatacccattgcacttaattcactatctaaatatttcaaaacaaatggaattgcaatagttgttgtattaccacctccaataaatcttttacctgtaccatcttcccaaacatcaacattttcaatcatatttgatttatgaccaatatttttattatcaattctagttgaacaacgtctacaacgaatactttcaccacctccaattctaggaacacttacttgtgtacttaataatgatccacaatctctacaaacacttgtatgtgtataatctgaacaatttaataatctatcttgtaataaaaatgatgtaccatgaccaattaatgcatccctctccatttcaccaactctaataccaccatgtctcttacgtcccttaacaggttgcattgttaatgaattaacaggacctgtacttctaacttgaaatttatcattaaccatatgtcttaatctttgataataaacaacaccaatataaatatctgctcttaattcttcacctgttgcacctgaatataatggttcattaccatgataattataacctgcagattttaattgttcaccaaagaaatctgctggcatatcatcttcactgaatttccatggagttgcatcttgtgatataccatgtaatgcacctgctttacctgctaaagattcaacaaacataccaattgtcattcttgatgggaaagcatgtggattaattataacatcaggttgaataccagtttctgagaatggcatatcaatttgtggccattttcttgaacaaacacccttttgaccatgacgtgaagaaaatttatcaccaattaatggttgtcttgtaattctatatttaattgataaagtttgacattctgtattaccattatcatcacttaataatttaacttcttcaatatatgcaggttcatttgaatgataagttttaattttagttttacctaaaacttcatcataataacaacaaattggatcaccttcttcaacatgtacaccaatatatggtaatccatcttcatctaatttttctctccattcaattggagtttcatcaggtccaaaaccaaaatgttgagtaattggatcatttctacgtctttgttgacttaaatcaattttttcaactttataaacaacaccatatgcgaaacctctttcatcagttgatttattaataatcatggcatcatccatatcataaccagtatatgaaataactgcaacaactgcatttgtaccattagggaaattatccattccataatcatcatataaattagctttaacaattggagtttgacctgcttgtaatttatataatttattatcagatctatgaaccaatgcaacacctggagtacccattgtttgtttacccatttgacattgatacatatttcttggagattgattgaaatctgagaatggtgttaaattagctaaaattgataaaatattagttggagaaaattcacaatgtgaatgaacattattttcaatttcatcaggtataactgcaatattcatgaaaacttgttcaaatggaccaacaatatctaatttatttaatggtaaataattaacaggtctaattaatcttgaacgtccaccaaataaatataaaccaggatattgaccatgatttgaaggtggtacataaccaatttctaatgataatggtataccatatttttcagaatcttcaattttccaatatcttaaagtatcagcaattattttaccttgtttatgagaacaataaccaataattttaccatctaattgaacacaacaaacattttgacctgcaattgaaactgatgaagaatttggtttaacacctaatttaaataattgcattggaattttacttgtatcaatattttcagttgtaatttcacatttatgagctaaatggtttaataaaccacaaggtgaaccatcaggtgtatgaacaggacataagaacccccaagattcaggtaataatttacgaacagttgttgttttcaattcagcaaagaaagaacctctatgaaccattctaaaatgtgatataaatctatggaaattaattttttctgcaacaactgtataaccactaacttgttgtaaatctaaaccagattgtgaaactaaattaccagttgataagaaatactgtaatttttgaccaatgttttcattaattcttgagaaaactctagtcatatattttctatcattaaaattaactgcaatacctctattaatatcggattgaatttgtaattttaaatttgataaatattcatcaattttttcctttaagatcataccatataggaaaccacctaataaaatttcttgatgttgagttgaatctggattatcaggtgaacattcaccagcgactaatgaatataattttctaatcatgaaacataacattttaaatttatcattattatcatttaaatgaactaaaacaattctatttaaaacttcattaccaacctcaatatcagtcatatcaggtgaagcattgaaaacaattctaaattttttacctaaataagcaactgattctttatttgagtttaatttataatttttaaaagttcttaataataattccaatctatcagttaagaaagaattatcaacatcagaaccgacaatattatcaaaaatttctttatcagaagtttcaattaatgctttaaggataagagtaacaggtactaaatattcattttttttccaagagaatctaaaagtaacattaccatcattaagataatgtaagacattagtttgagaagtttgatctggtctaactgatcttaattgaacaccaaatgcagaataagaagcacctctattaccgaaagaaggtctaataattgccattggatgatttcttctttgaacaataagcatacgaattaatttttcaataccattaacgatgaaataaccacctaattcatcactttcttctcttaagttaactaattgatttggggataaattatttaaatgacaacgatttgattggaccataattggtaattgaccaacatctctaatttcagtaatttcttcatcattatcattaattgaccaagctaattttaataataatctacctttataagttgaatgtctttctctacattcacttggataaatatttctattgattgataatttatcagttaaaggtacggaaggtttagcaatttgaactgaatcaactctaatttttaatttatttggaccaattttttcaggatcttttgaatcaaaaattgttttataaccaatatctttaacagctaaattaagtatatcatcagttaaagcattaaatgaaccaatatgaggtttaacagcattttctaataatgggaaatttgatttatcctttggaggatttataaatctattttccctctctaaagttctaaattgagcttttgtcattatttgaataaatgaagggggggttgatgattagatgtggtgtatgctgttgtgtaatacaaaaagatacaatcaaatcaaaaaattaagttaaaatgaaaaaaaaatttaaataaaattattaaaataatttttcatcatcaaacagtgtcttctaattagtaaagaaattattattattatgcttaccgtaatctgataggaaaaaaaaattttttctattagcgtcgatgcgtctgtgttgtatttttttaaattgttaggtcgatgcgtctgtaattttaatatgaatggtagttacgtaatcaatataaccttttttgatgagccttcatcttatacgatcactatacgattagaaggctcatctttatgtctaggttttagtaatttagtgatttagtatttagtacagcatttgcccttgtattttctttcacagttttattaaccacatcttttttgtctttttcctttcaactatcatgtttttactattatcatctatctaattatggtattatattaatactaagtattatcaaaaatatcattacgtaataacctattaactatctatacatactaaatttaattaggtaataataaatttttcacattctaattttttttttcataatttttcatttcttcggcaggaatgattcaccagctttgacttttcttttcaaatcactacaatactgatatttttctacatcttttcaacttcttatatactttcttagtttttttcttttaactaaccaaaatcatatacaatgaaagtatctgataaattattagcagctcatagagatccatcatctccagctactttttcatttgaatttttcactccaaagacaactcaaggtgttcaaaatttatatgatagaatggatagaatgtataatttaaatcctttatttattgatataacttggaatgctggtggtaatttatctaatttaacttctgaaatggttaatataacttcaactgttttaggtttagaaacttgtatgcatttaacttgtacaaatatgccattaaaattaattgatgatgctttacaaaatgcttataattcaggttgtcaaaatattttagccttaagaggtgatcctccattagatggttctgaatcaacaggtgattttaaatatgcaaaagatttaattaatcatattagatcaaaatttggtgattatttttgtattggtatagctgcttaccctgaaggtcatcctgaagaacctgataatttgaaaactttagaatatttaaaacaaaaacaagatgcaggtgctgattttatagttactcaattattttatgatgttgataattttattaattgggcaaaacaatgtaaagattatggtattaatattccaattatacctggtattatgccaatttcaaattataatgctttcattagaagagctaaatggaatggtgttaaaattcctcaaaatttcattgatagattagatccaattaaagatgatgattcaaaagttagagatgaaggttgtttattaatggctgaattatgtcaaaaattaattgattcaaaattaattaatcatttacatttttatacaatgaatttagaaaaatctacaacaatgttattagataaacttaatttagtttcattaaattctaaaatgaattatgaattagagaattcaaaaccttggagaaaatctttaaatccttcaagagagagtgaaaatgttagaccaattttttggaaaaatagaaaattttcttatattcaaagaactaataattgggatgaatttccaaatggtagatggggtgattcaaaatctcctgcatttggtagtttagatatgtttgaacatgaaattattagacattctccaacaaaaattttacaattatgggataaacctttgaatattaatgatttaggtaaattaattatcaattatattaataataaaattaattgtttaccatggtcagatactcaagtcacaactgaaattaattcaattaaatctaatttaattaaattaaatgaaaatggtattttaactattaattcacaaccaaaaatcaatggtgttaaatcaaatgatccaattttcggttggggtccatcaaatggttatgtttatcaaaaacaatatttagaatttttaattccaaaatctaaaattgataatttaattaataacatcaataaattaatgagttaaataattatgatattcttaactatattattactgattcaaagacaacaacctatcttaaaatcaaatattactgatcaatctgacgttaatgcagttacttggggttgcttccctggtaaagaagttgcacaaccaacaattgttgaaaaagtttcattccttgcttggaaggatgaactttatttaattttgaaaaaatggtctaatgttttgttaaattcttcaaatgatttaacctaatcaacctgatgaatcggatagattaaatgatttaaaatcttctaaattcattaaatcattaattgatgattatgttttagttaatttagttgataatgattatgttaatcaagacgatagaatctttacattattcgataacatttaatactgttccaacaacaaaaacaacaacatcaactgttcatattcatattcatattcatattccataatataatgatataatgatattatcatacactctctttaatttcaacacggcttttagtacacaaaggcaggtccatattcaacacaaaaaccgccgatcaatttttgtttcttaattatatttcaatttcatttttcttttatctctcttttaatggtttcaacatcgtatttaatacatatttcaacatgccctaacacacacataacttacttgtataatatatccctcttatatagattatatagtccttttctaagtcctcaacggataatggtttttcaacatgaaaatttaattttttttttttcaaacgctatgtacatgatgatgtaagttttttttaagataataacaaatcgaagtatcattgattcatttctttcaggacaatgtatatttgttctataactaacactgtcacagatacacctgttttatcactgaaatcaaataggatatttgataaatcaacattaaccaattacatagataaattcggtaaagatccaataaataatgaattaatgaatattgatgatataattgaaatttcaatacctgaaataaatcaaaataatcaaaatgaaataactaatgtttcatcagttccatcattattaaaatcatttcaaagtatttgggataatttaagtatcgaactatttcaattaaggaaagaattagatataaccaagaaagaattatcattatcattatatagacaagatgctgctgttaatgttgcagttaatgcatgtaaggaacgtgatgatgcaattcatgctttagaacaatttatgaaagatagtggtaactcacaaaatgatgtagtaaataatgctgtaaaagaaactgaaaaggaaactgaaatcgaaattgataatgataatgaggttgacaatgttgatgaagattggttaccaatttctgaaaaattaaatgaagaacaaattaagcttgttgaagaacataaaactactaataaatcacttagaggtaaatctccaatatattcactcgttcaagaaaatgaaaacaatgatgaaagtcataatttatctacatctacagatttcattgatacactcaaagttggagagaaaggttcactaactacaattaaacaaaatcaaaagggtgattccgctgtattggtttactcagaaaattattttcaattaataagtttatcaaatacttcattagaacccttatctgaaattcactacatcagcaaagggtaaatccaagaaaactgtcttttggatgaatgaaacaccatatgttttaaatttcccagcacaacgtaaaaatgccaaagctgatagtaataatgttcaattaattaatattcaatcaaaggagaaaacaggtttcagattgaatagtgagaatttaaaagatatcacttcagttattggacatccatcaataaatttattcattgttgcatttaaagatcatttagaatttgtttatgatttgaaaagcgttttcattcaacaattatcatctaatataaattcaattcatttacatcctgatggaatgttattaggtatttcatatattgatggtaaagaaattgatatctatgatttatctgaacgtcaattcaaattaaagattgattggggggttgaaaatttgattgattttgaatttgcaattaatggttatttaatgattatagttgttgaaggtaaggcgatgatatttgacttacgaaaaaatacagtaaccttagaatctgaatgttgaatacaagtcaggtttaatggaattttcattgatgaaggtgtttcattaattgtaatgctagtagtcattatgtcattcttgatccaaagggtaaatcaattgtaagctctggtgcaattaacacatcatctcaagtactatcacttcacacagattttgaaaatggtaaaattcaaacgataatggcaacagacggtgattctggggatgttgttctaacaaactttatctaaacttaggatgtcaatcattatctatctaatatgtaacattatataaaaagaaataacaataaaatagaattagaaaaaaattacactttaatttcagggaatgtaattgtttgattaagatcaattgtaccaaatgtaagtggacctaaatgaggttgaatattataacctagtttgaaagtacccgtacgaccatgtaattcaggtgaataatcccataatgagtatttagatttaatattttttgattaaatacattttactcttatcatcaaatattttatcccaaataacaattttatcagcattttcattatcattattattactatcatcattatcaatttcaacataaacatatgcgaaaacttgtttagtattccaatcaactaaatcattaaaatctgcaaccatatcaaacttaaatttagcattttccttaggtttttgcttagttgcaccataattcctcgtatttttcaatgaaactataggttttgcagatttaaatctaatttgattatttaaaataggtggatttgcaattgttaatattgatacaagaatcataacaatgaacacacctgttgttatgattgaagataatgtgtttgccctctgtgctaatgaatgcatggttgttcctacaaattaatatctaatatcaggaagtacgtgtaacgtgttgtcaagtgtcctttctctgatcttcaataatcatgacatgaaaataattataagaatcgcttacgtaataatacacagtgctatatacaggttctattatcttatagtgttcatctctaggtatccttgtaaagaatctcttgtctatcgttatactccttttgtgccttggccttggcttcacggacttgtttacgtgtttctctatgaacggctctaatacgtccacgtacctctctttgttgttgttcaatttcttttctaacatcaaaatccaatttcttatcttgaatacgatctgttaaatatttcagttcatcaagtaattctttacacctttgacgaccctttatgacaacttctaatttatttaacattgacttacgtttagcacgttgtctcgatatcttcgtttgacgtctttgttcacgatagaatattctacgcatactcttagtttgtaaataacttgatctaatatgacgtctttcctttaataaatgttctaaattatgaagaatatacttgtttgatgatcttctcaatgtcttcattaaatcgagtctttgaccatatgacaatctctcacttaatgcaatcgaaaggttcttaataacatcataataaacatcagctctaaattcatattcaggtttacgtttcataaatggtataagatcagttgtatattttaatttaactctcttaaattgctgatttctgatatggattggtaaaaggtatttatcaataaatgttgctgcttcctctaaacatacaattctttcacttagaaataatgcagtctcatttaagtttttattactcattactatacccttttgaattaattcaccaactatattagtaacttcattcaatttgtcagcagtttctaattgtctcaatctataaatccaaatatcatagtgagactttttaatccaattaggtattttaactcttgcatcaggcttcttcttaaccttattatcatcataataacttcttaaattaatatcttgttgtgaatctaatctactaaattcgtttctatcttcaattttatctaatctagcttgtgaatctttaaatctggaattttcattcaacttagttatcatttccaaataagtttcatatttttcgtcaaattcaatccatctttcctcttcacccaataacattaattcaatatttaaaatgtgtatattattagttaatgtatttctgcttgtttcaagatatgcttcaaataattttcttgcttcaaaaatatccttatatttaatcacagctttaataactaatttgaatgacattggatttaaatctgcatttaataacccaaacttatcattctttctatttgtcaacacatcatctaatatagtaatagtttcatcaatactatttcttgcaatccatggcattgaaacattactttgtaaaactaatgaatacatcttaggtgtcggcgaaacattatttattaatgcataattaacaaatttctttgtcaaccatggtctatttgttcttaaagctgaaaaaatcatttgattaaaaatcattgatggaagtttatcaattttgagggtttctttaatttccttcaatttataatcaactccaaatgagccattttttctaacccaataagccatatatgaaacatatgctttatcatctatatcacctctatttattgcaatagttgatgctttcttccaaatatgttcataaagttttatatctttacatttaattgcactatctaatgctaaaacactatcttgataaaaaatttcattttccttcattttcatataattatcaattattatatcaaatctatttgcatggaaatgtgatttcataataaatctactatcaatcctttcaatattaagattgaattttggataatagaattttaaaatatattcaatacttttataatctcccatttcagcaaatttggtgaaaattggtataaatatagctttcggtaatcgaacttcctttttaactaattcatctaaaaccatatagactgactgtatttcattcatatatgctaatgattgcatcattagtccataagatttaggtgttaaattaactttataatgagaatacgctgtaaaccattgtaatgcatcctcatatgatttagtattaacgtatgattgaataattgatgataggatttgatcatttggttcaaaacctcttttaagataattctcccataatgacatcataactttatgagtgcctggacgaattgataatgctgtgaataatgtgatatattgatcttttgttatcacttcattattttcatatctggttgtataaattttttctaattcatcccagtctttagttcttgctaaaatgattaagatagggtgtaaggtttcatcagattcaaaatctggatcttcttttataaattttttcaatttagttttagcttttgcaaattgtttatctgtcgttaatgcttttaaataaccaatcttatcaggttttgtaattgtgagctttagttttatcttcaaatgatagaaaatttgccccacatatgtattattttcatatttactgtgtgtataaatcaagactgagaaaacattactcaattgattgttatcatattttaaatctttttcaaaattctttggtaagaaatggagtttattatttctgagataaattataggttggatttctctattatatcgtagtttttcattatcgtaacaatattcataccaaaacttaaatcttaaagttgttatttctagtttagataatgcagaaatcaatttatactgaaacgaacttctcattaatattagtattatcgtaatgcacatcaaagtactttttcaaaaattcatattgttggtcaaattttgggttattaatttcattgaaagtaacaaataactgattgatcatatttggaggaaaataaatattcatcttagaatccaagtttgtcaagtaatcatataaatttagttgtgatattttatcaaagtttgaatacagagtagagacaattcttaatgtgaaatatttcaatccatcaaattcattctctaataatagacggttcaatatcggtttagtatcgtcaaatataatcatatctgttaaattcattaaatcttttatgtatggatcattacttaaattttcagtggatttccaaataattggaattttatcatatttgaaaacttcaaagaatgtgtataaatcattaggtgttccaattttatcaaaaatttcaataattttactgcattgaccaaaattgaaaaacaaattataattaggtaaaactgatttaactaactgatatgctaaatcatattgtttattggtatataaccaatcaaagagtttagatacttgtaaaattgaattgggggtaattgattcaggtaatttcatatcaaaatactttagttcattattaactgcatctaatttatgtattgctatttctcttatactaccatctccattggtaataattgtatcacttcgtaatatcctatttgttgagaagcgtcgaatagacatcgttatatttacatgttccttatttcgtattgtatgtcgaaagtggttgtactctaatgtattatattgtcgttgattgctattggttgatggcgaaaatataggattcggtatttgatcaagtgatttcttctgatcaaatgaacgcttcactattagagtttcccttccatggaaaaatgtttttctgaattggctcattatatatatgatgaataattgattgattgatccccctgataagttctataaaatgttgttaatatgtacagatttggtgttcttttttattagtagggttttgttgggatcagagtctctttttctgcaatactgtcactatacaaatttgacaagctcgattgtattgctgatattgatgataagtgagagagaatggattcaaatatggtcaaatagagaatatgttcgaagatggagatgtaaatccttcccaattgtcatgccagaatagtaagttccaattttccaggaaatttaatttttcaccttcactcactgtgtgggaggattagcaaaaaaatatttttttttcactttaaaatttattttctttacaggttaggagtatttcttaggtgattaatacataaagtataggtaagtataatggcattaactggtaatagaaatatacgaggaaataaaggtcctagaaaggatactagaaagtatctcaatggtaaacagggaaaaacagatgagattagaaaagctttgacacatagagctagacttaggaaaaactatttcaaattattagaaagagagggattagatgtgccgagtaaggaaggaagtgatatagttgaagaacattacagggaagaaagggctgcagatgataatgataatgattcagaaaatgaaaccgaagagaatgaaggacctaaatcagaaattgatataattaaagaaaaagttaaagaacataaaccattaacatttcaagaaagaatggcattgaaaaaaagtagaaaagaattagataaacaaagaaaaatggaatctaccaagaagaagatacaaaaaatgaaagaggaaaactaccaacgtcagagacaaactgaacgtataagaaacactaaaactagaaaaggtcaacctcttatgggtccaagaatcaacagtttacttgaaaagattcagcaagataaaaccaataataaataattagttcgttccttagatatccactaaattgtataataactctctttgtaatgattcaacatttgcatcagtttcatgatatttgctagtgatacctcttgtttcactaacaaaggaatttttgtaatcacttaattctacgatccttctctttttagtattttttatagcttccgtattggtatcactggtgtataatctaacttcaccatttaaccccactgcaacaaatctatagctatttttgagtgatctatttttagttggtatccatggaggataagctttaatgagtgaaagtcttggtgtataacccacatttatttctgaatatttgactaattgttgattgcataatgataatgttcccttttgataatctgcaactataaaatctgtatggttattacagattatatcagaacaacggtattcaggaattatcttatcatttgtagtatcatttaaggtatgcatgtaacgaagtttcatcactgtattatttcttaatgtaactaacaaatctgtgtaaaatggaactttttcttgtttggaattttgttgcacaatttcaaactttttaataggttcagttccatgatagttgaatacatcttggtcaattaaaaacttttcacctgattcgattgaaaatgataatatatcacaatttgatgaaagaaacaaacgcaatctgtcctccaaaatgcatttaagatcagttataggtgattctgttttaattaccggtgtaagtggtttgacttcaacatctttggtagttttgttttttaaaatctgaaatattttcaggcatccctctgttttcttttttatacatccaacagcaacatagtaatacttttgttcaaatttatcaattgcaatttcacacccacatagtggaattgcatcttcttcaaaaagcttgtttatactctctccattctttaaaagtttcattcttttataatcaaaaaattgaattggatctgcttgtttgacaactccaggaataggtattaacataattaaaccatttgataaaggaaccattctcattgattttgaatttagttttttacttttaactaatgttccagtagtgtttgatacagcaactattgatagatcattatagcgcaaaagcgcaatttcattagctgcgccattactcccattgaacttacaacaactaataataccggagtcaaaatcatcacaaaacaaaactcttttaggatagtatgatgactttatatcaagtttccaaaggtaatcggattttaacaatatatcattattatttgttttgattatatcaatttgatttttgtcggataacttaaatgtacctaaaacagaccaatctgttatatcatttagttgaccacctttgattttcaaaaatgagtaatcaccttcctttgatgttaatatgtatagatcatggctattcaaacaagtaatatcatgaggtttgaaaatattagttttcaattttaacacaccatcattcatatcctgctttaacttatctgtcgtgaaaagctttaccatttcatccttgtttccattctgtttgaaaatatttatgaatccttcaataaatccaataaacaaatacttgacgttatttattaacacaaatttcaacattgacagatttttgaaattattttgatcatctctaaagcttatgttattaaatgtcacttgtgtatcactcttttcagctatttcaaatatgacaattccatatgtatccgttattttggaatatttaagtatagagaccgtgttaccagcaacaacggcagttatacacttatcaggaaattcaaatttctttactatattcaaaacagcatcaaaaagtatcatatgccttgtagaaatcaaacataatttgtcgcctatgtactctaatactatcactttcccttcaattggcacatctacttccaaaactagagtgttttcgacggagttatatttatagattttattacttttaccatcggaaacccatatcaaatcgcctttaagtgggtacaacttactctgtggttttgcatctgcactttttattgtactaatgattttaccagtatatccatttttgattttgaaaattgaattatttgattcctggccacccaatgcccagaactcagattcgttcgcttcaattggtaatgtatcatttgaagcatcaataatcttatagtcaatcattggataagggtacagtgacgaccatttgtcagctgtaacgggtcttaaaattggtatgtcattttcaacaactattttaacaattttcgattcagttactcccatttcattggcgaatatgaaactaaagttggatgtattttcaattgtttcaaatttaaaaaaggaaaccgtgtgcttatatttgaataatcttgtcatttttgtaaggtatgtgtgtttctgtgtatcataaaaaatatccagtaaaaacaccgttctattatgagacgttgaaattaggacctgatcatgtaaataaacatcaattgatagtttatcactacctttgacagaaattttctttttagggatataatatgaatttaaaacaaatttggtagttgtatcaggatatttagctttatgattttcagtatcttcaccaccagtgaaaaagttcatatgtttgattgtataacctgattcttgcaggaatagtactgaacgagatgcagttaaaggaataatatttaatggaacttcgaatgtatttttcattgaaaacttattcctcaataatttgtttacatcttcaaggttttgaatcccattaatggacaatgtgttattcttctcgtgtgatgagtaaactaacatttcttcagttgatgaaattttcagtaatgttgcattaattacattttcaggtatattatagtgcttaagcaagaacggtattcttttgttattgtaatatatcttaaaagattcaacaacattttcatgaatgaaaaacactgtatcagttttatcacttactaaaatatttgaaagatggccggcatttgtagaatattcaaatacaacatatggtttaaaagactgtatatttctctcatatgaaaaacgaattaacaatattttagaagaacttaaactcaaaagtaatgtatcatcatcatcatccgtcgtccctttaataacagcggaggcttcaactgtacaaggtaaagaatagaaaaattcatcatcaatagaaaatgatgataaataaacaaatacttgtaacttctcttttcttcccagtaactaaatttttgaaattatcattgtaactatcaaaatcactgaaatcgtcaaatatttcattttgcataatataatcaccattttcatcatatttatcattctcctttgccttcaaatcattcaattcctttgaaactgtcttgtaattttctgtttgttcaattacagaatttgaattaccaaatatggatgaccattgatctttactcaataaaccatgtgttgatccaacatccatttccatattttcaatgttttttacactgtgactaattgaaaagtcaaaaaatgcattgtttggtaatctagaataaatcaatgtctctgcgcataattttggtttatttgatgggtatatatccatcgtatgttcagttgcttgtgtataaactatctgttttcttaaagagcctttgactaaacttatacatgtgattccaatttttttcaacatgaattgttgatctaagaattacccgattaggaaatatattgtctaaaaaaatttttaactatacaattttacacactagcttcagctttaacatcttcattatctaatttctcctctttctccttcgctggtaatctatacttaacataatttgaatgttttgtataataactaaaatttttatctattttattattctcatcaacaacaccattaacaaatgagcttaaaaatttccttctattattaggtatagttttattaacataagactcgtgtttgtaaagattattgaaaatattgtagtttttcaatcttgtatcctctttcttcttatatgacgacaattgtgtaaaatatttcttttcctgtatttccctttccttagcaactctcatattctcatactctatatctgaaatattagaaccgccatcagaaacatccacattattaaccaacctctcactttttaccgtaccattatctctcttctttttcatcttattaatgatatgtgagtaatcatgtttaacatattgatccattataaaacgtactctaaaatcaattaattctttcttaacaacatctatgatatcaaatgaaacatcagacaaatctttaggtttaacaacagtatgtgtttctcaatcgtttacatctttcgatataatcatcttcatctataacatcatctcttttaatagtcacatcactgattttcttcaatttttcgaaatgatcattcaaatcatcaattatttcatcaacaagagatatttcaacttcaaataattcatttatcttatccattacgttctctctatatgaaatatcagtgaaaacttcaattttcttctcattgttcattatatccattttgttgataacgtattggaataaatataacatcatagcatctgtaaaatatatgaaaattatttgattcttcacagcatgtggcttccctgtaaaatatgaccaagaaaattcgggtgatataggtatactttcattattttcaagtaatttacatttcggtatcacattgatgatttctttaataatatgttctataaaattttcaattaatgcattaaatgttagtatactctttggtaaatataacatcgttgtaactaattgcggatataattttgcttttgtttgcagttcattaatattgatgaatctatgtacttgatcatatggattgacaattggttcttcatctgcttcttcgttatcttttcctctgttatcactatttgttgaatttttggataatatattgttgaaaaaactgctaatttctatattattgtctctgagaaactcgtagaggttccctgtatcataaaattgcagacttttcacagttggtgatgaattgtgaatattcgttaacgcttcttttattttgttattattgtctttttcagtctctgttttcccaagttcaaaactatgcatactgggcctgtaataattacacttgaaagtcattgatttgttgattatactgttgtgtttaccaaatgaaattgcataactcttgttgatgatattctacagtaaaattaatgatgcataaaaacctatatacaaacttttacggctggtgcgtagtggctggtgaaagaataaacggcccgttaaaaatcagaataatctcactacacttaaagcctaagtacggctgaatttttcacttacactaccaacacttgctatgcacttattccttacataccagtggttagacatgcattttcatgacattgactattatgagctccagtaaaaccttaattataaaaattataaatgcctgaactaagagataaaacacaaaaaacgaaaaacaattaaaaaagaaacacttatagcaatggaagaaaaacctaaagatcaactaaaggttatagaaattaaaaaaatagacaaaacaattgatgaaaaaaatgtgtataaactgaaacgatttgaatttatagaaaaacacacaatggattaaactgaaagttgtgaactgaactgaaagggaatgatatagtgtagaataaatcaacgaaattcaacaagtgtctactcttgttgaacatgggtattatttggtgcaactggattatttggtacatcacctggatgttccattcctggatgattataataataatacattgggtatatttgaccattaccattgctttgaaggtggcatatagttaggatattgataataataacctccatttgttggtggtggtggtggcatattaccagttgttcatatgatcaactggaatcattggtggtatttggggattcatatattgcatatccttagttggataataataataacatggatattgataagatggattcatgactggtcccatatgcatatttggaatttcaacttctccattatcgattgaactataggtataaccagttttaggaccagcacttgaaaatgttgcattacttctcattgttgatatatcattttcaacatcatgtttaatattgtccttattaggttgaattttttcaccattattcaaatcagtcattaccaataatttcaatactcatactttcatcattttcatctaatttagaatcattcatagaatcatcaacaaaactttgattagtacttgtttcatcatctttctttgattcattgttccattttggctttatccatattattgttttcaaatgcaggagttttagtaggaatgaaaggattgttaaattgattatcttgatagttcaactcaccattatttcttctaattgtgaaatcattttgatttctatttttattataaaaattgaatctatctctttgaatatattgatttttcatcttaaaagcttgagaataagtttcaacacctgaattattgacggtactgttgaaatcttcaaaatatgagttatttctagtacggtaattagaattataattattattgaatttgaaattattcatgtaagtattagtgttatgattactattatgattgttgttgccataattacgttttttgaaattaacaggtggaggtgctaaatttaattttaatccactatcatttgagaattttcttctataattattatacatttcacgatattgaacatgaatagttttatatttgaacattgaatgattttctctttcaactgcagcagctgctgcttcctttgttttaaatttaataaaagcaaaattacttaatggtctattaactaaaattgcttcctttattttaccatgttgttcaaatctttcaaccatttcatctttactaattcttggatctaaatgaccaacaaaaattgaatatttatcaattgtaacttcaggtacattactatattcatcttcaatattctgagaccattcaacattccaatttcttttagttttcaaattggcaaaagcactaatagcatcttgacgatatttaaatttacaataccaagtattatagtgagttttcggattaacatcatcaacaacttttgcattattatctaaggtaaccaatttctcaatttcaccaaatctagttaataacttattcattattttttcagttattccatcatttgttaaattaagataaagtgtacgattaactcttgccttttcacatctaacagttctaccatttaaaattgaatgttgaccctcactaattgctttatcggcatcttcatctttagcatattgaacaaaagcataaggacgattagcaggatctcttaaaactttaactaaagtcatttcaccccattgtttgaaatgttcagtaacagatttacaaagaatatcatcatctaagttagaagataaactagcaacaaaaacacaagctgaaggacgacctctaacatcttttgattctttatcatatgaattaaaattattattttttttatatttttgagttatagtattaatagcatcatcacttttattaattgataagatttcatcgatatatttttcatcttcatctttttcaataccattatctaaatcaatatcgagattcattatcttcatcatcatcatcactatctctaatttcagaatcatcaacattaacagatactgaattaatatcggtatcattatcaatatccatatcattttcaatatgatgatgatgattactatttttattattaaaatcatttgaatcagagatagcagtattagtatcagtttgagcaattgagacagcagaatttaagtaagaaacaattgaattattttcaattcttcatcttcatcatcattcatcttgatctttacaatttttttcattttcaattttaatttcattctcaaattcttgtttaatatttgaattaattaatttattattaactgaagcatttaaatccatattttcgaattttggtttaatttcatcattatcagataatttaattttaatattattatcaaagctagtcatttttagattggaattaaaattaattgagagtttattattattttaggtattatgatagcagtagataaaaagggtatattaagatagcacaatatttttagcacaaaaacaaataaaccacagtaatttaaattttaaaaatttatctcaaaatgttgcaaaaataattcaaaaggtatagtaataaaaggggagggagaatgaaaaagttgtgagttatatctgttttagtagttaattgcagatgattaaatgaagggaagagggaagagagaagagagaagaagaaaagcaagagaaaagcaagaagaaggaacaagatgcaaagcagataattaaatcaacaaacaccagagccatctttataacagtggaaatagggcaattttgatcagttagtaatgatacattctaattaacttcccttattggtacaattgttgcccccttttcaaatataatgaaggctcatcaatataatgtataaaatgtataaatgtagttagtaaattacctaattagggtaattaccttaattattatttgcaacattaaacattgtcataattatgtccccttttcgcttttttccttcaaaaatttttttttctctcctaagcaaaaaagaaatttaagaaagtgaaaattgagaaataaattctgagatcttaatatgcataatgcattgaatactagtttaaagtttgtttagtctatacatttaggttaaattagttaattagttgattgattgaattaattaaatgttcccttgatcttgtttattttatatttaattaaagaatatttacgaagaaaaaaaacgtatagatacataataataatttaatgcttgattatcatgcaaaattcgtacttgcaccaatggttagaattggtgaattaccaactagattacttgctttaaaatatggtgcagatttagtttggggtcctgaaattattgataaaaaattattaacttgtgaaagaatttataatgaaaatttgaaaactattgatttccgttcaaagactggtaataaaaaaatacctggtatgacagatgttgttttcagaacttatcctgaattagaaaatgataaagttgtatttcaaatgggtacatcgaatgctaaattagctgttgaagctgctaaaattgtaattaatgatgttggtgcaattgatataaatgcaggttgtccaaaacatttctcaattcattcaggtatgggtgctgctttattaagtacaccagatttattatgtgaaattttaacaaatttagttaatgaagttggtaaaccaaataataaaccaattagtgttaaaatacgtttattaccaaataaggatgatactttatcacttgttaatagattagttagaacgggtattacaaatttaactttacattgtcgtacgagagaaatgagaaatagagagaaaccaattagagattatattgatgaaattaaaaaaatttgtattgaaaataatgttagctttattataaatggttatattaaagattataaagaatttaaagaattacaaaatcaatatggtaatgatgttggtgtaatgattgcatcagcggctgaaattaatccaacttgttttaataaagatggtacattaccttggtatattgctgcaaaggagtacataaaatttgctgataaatttcaaaatcatccggcaaattcaaaatattgtattagtagaataataccaaatatacgtaatgaaaatgtaatctataaattaattactaaggcaagaactgcagaagaatttagtgatattttattaaacaaaatggatgataatggtaagtttatagataaggaagatgataagaaagaagaaattactgataagacgacatcggtaaaacataaaattgttgataccgaaagcaacattgaaaaaaaaattaaagtttgataataaaaattttaatttatttaatttagataatctatattaatacattacattctatttacatgactatataacactttacttctttaattcattctctcctgtagtaaaacctgatggtgtgatatctttatatcttgaatcataatatccaagaactttataaattttacccatatctcctaatcctttaccagttaatctcttatatgatgatgataatttctttttcatttcttcattatcaacaaattttgacattaattgatcaattctataacctaatcccattgaattaaggaaatctccctgttctgtaacatatgtctcaaattttaaatcttttaaaatttcacttaaactactaaatcaacatcaattgataaatcaacttctccaacttcacttaatggattaacaaatttatgatctttaatacctcttaatgaattaattggtattgtagttgtaccataatcaattactaaacctgcaccaatttcatttgattgaacaattttagccatttcataaatataactatgagattctggtgaaatttcaatatctgaaccaattggtaaattatcatatcttggtgttgtcttaggtattgcacaacttggagttgcatatggtgccgtaacaacaacaaactcactatcaaattttttcgatttttcattattgtttatagttgttacatttggtaaaagactatcctttttagcatcaggtctaatatcaactaaatattctctccatccattttcagttttagtaaatctattcattggtaacgcatcataaaattcatgtgccataacaaaattcatatatttatcattattagcagtatttaataattcaggtttatcatcctttaaccaagttatttcattaccccatctagatatggatttatatgtaaattgatcaattttttctaatttactagtttcgatatcacataatttcttatattgttcattaattaaaacatcagatttttcaatgaaaacgatttcaattggattactatttttaataaatttatttaatgttctaatcatatcattcattaaagtacccttacctggaccaaattcaataattctgaaaactttttcctttattttaaaattttctctattgaaagttgcttgatatcttaattgatttaagaaagtactgaaaaaccataatccacaaatttctccaaatgttgaactaatttcaggtgatgtaataaaatcaccagttttagtatctaatggatttctagttgtataataaccatattctggattaactaaacattgtttcataaaatttgcaattgaaattggtccaactgtctttatcatatttttcaaaataattgttaaattttcagaatttgttaatttttcatttaatttttcagttttctctctatctgctaatgtaaaaggttgtggtggtacaataggtttaccatctaaacctataagttgaggattcttaacattttcatcagtcttactcttattactaactggtttaccatcagcacctaaaataatagatctagtgaaaacagtatttttaatcaaagcttttacccaaataccctctataaacagaagttcctttgctgatacttctcaacatttcctatatgactggttctacctgtacttacttacacacctatagatataccttcactattacactctacaatgaagaagcagtatataatgaaatgtagtgaaacatgtaaagacgcatcgaccccacagccaacgcggtcttccttttttgcttttctttttcttctagacttactatggtgatatcggggctttattattgtcatggatttataatagagggagatgttctagtaaatggattgattaacatatttgtttattatttcttatttcttttttacttttgctctttctatttctatttctaatcatacactgtattcactctatagtcaataccccacgatttatatctgatcatttactatatatatatatatatatattaactacaaagaacgttgttttgtatctaattttcacataattatcatcttttattatcattttttttttattttaactatatacgtcaatcatacttatttcgacctcatcaaatgataatagataatataaacatggatatgaatatgaataataatagtatcaataacgacatcaatcaaaggaattcttctgctagtttaaatagtctcaatctggaagatttaactttctataatatgcttaatagaactcgtgctaaatggaactcatatagtccattacgtttgaataccacaacattgacatcatcatcaacaacaacaccaaattcagatgtattattacgaaataattcaagtaggaccaaaatacttcatattttctcagttttatcaaaatttattaaatatattggacctggtttaatggttagtgttgcttatatggatccaggtaattttagtagtagtattgcatcagctcaatttcaatataaattacttttctcattagtcatttcaaatataatggcaggtttccttcaaattttagcaagtaaattaggtatttgtacaggtcaagatttagctacaaattgtaggaaacatttacatccacaattaaataaaattattaatatattcgcagaagtttcagttgttgcaactgatgttgctgaaattattggtactgctattgcctttaacattattttcaatatacctttattatatggtgtcttattatcaatcattgatatgttatttgttgttatggcttatagacctaatggaccaatgttattgttaagaatatttgaaggttttgttagtttattagttttcggtacagttatttgttttgcagttgaattagcaaaagtctctccaacaactgactggaaggatgtagcattagggtttttaccttcaaaggctgtatttactgatataaagggattatatttatcagctgctttattaggtagtaatttaatgcctcattcattatatttaggatcaggtgttgttcaagcaagaatgaaatcttttgatattaaaatgggtcattatgtaccaccagtcgtcaaaaaatcaggtggtttatttactttctctaatcatgatgaaaatgaaagtaatgatgatgataatacagaaaacgcttataaaccatcaattcatgcaattgatgaaacaatgaattatacaattgccgaattagttgtttcattaatatttgttgcattatttgttaatgcagctattttaattgttgcaggttcagcattatcaaatccaactgatgatgatggtgatggagctttagaaactgctgatttatttacatttacatcatttattatcaactcatttatcaaaagctgcaggttcattatttgcatttgcacttttatgttcaggtttatgtggtggtacagttgttacaattgcaggtcaaatgattatggaaggtcattcaaattcaaatttaccaccaggaattaaaagaattataactcgtgtatttgcattaattccttgtataacggtagttttaattgcaggtagagaaggtctgagtgcagttttaaatggatctcaagttgttttatcattcatgttaccttttatttgtgctccattaatttattttacatcaaatagagaaattatgaaagttgaattatatagagaaactaaaaataccaatagcaatgattcaaacataattaataatggagtatttgaatttgttgaaatggatgatttatcagataagaaaatttcattatcgaataatattgatgattcacgtggtagttcttttgaagttggatcaacagatttatttgaaggaaccaataatgataataataaggctctaagaataagaaaattcaataatgatgatatcattgtaaaacaatataagaatatgagtaatggtaaaataactacaatatgtgccgtttttgtttggattgttattacatttttaaatttctggttattaataagtatggcacttgggaaagatgttccagtgtaatgataacagtaaatcaaataaactctattatatcataatcaatatactatatactatataccctcttttctataataaatataaaatatcatatgactttttgttcaatctttaagtaacagtggttggaatatgaacttggcgcaaattatgattcgcagctataaataggacgcgtaatctcttttctcgagttatttgtttattactttctttcttcctttctttcttccttttatcaacgagtaatcgttcaaatcacgtagggaaatatcctattatataagaagattttaaatacaaaattattaaaaaacatacatttatacaataccatgacatgaggttttctaatcatcattaaatttcaaatataaaatcatataaatactgaacaactgacattttttaattgctccaactcctttggaacattcaacttgacaccatccaaataccaactaaagagaatcaattttgcagctttgaaaattttaacactaatacatttattacagcagccaaaacatttcatgcaaatatcacttggaatatacaaagttgtaaaataaactggatcttaacaaatttttgaatttcagtatatttatccacatattcattttcccatttgatacatctcaatcttttagcatgaacatcataatacttcttccacttttcatcactttttggattacccaccatctgtttattgtactttatcaattgaattgaaagcattttgaactctttcaaatactcacaagcccttacaaacacatcatttccacagctaacaacccttctcgtgaatccacctaatgtctctttttccaaaaaccaataaaacaaaatcagcacgaaaaattaacaattgttttttcaatcaggaacaaattcagccaaatgaacaagttctgcaaaactgcaaataaacattggatccttgcagacatgcttcaatcaacaaatactcatataacctataatttttactattgatattattgtgtactgggtatttgccgtatgaagagtttacaccaatcaaatgaccccttgtatcacgaatatcattattcaaaatggaattgatattaatattacaatcagaatgaaaataattgaatgttttaggataaagaatttctaaaccttttctcaacctcatcatttaaccaacttcccactaatttcaattcctcataatttggattaccatctaaaacccgtgatataccaactacatctctctcatcattaactctacgacgttttgcatcttcagaagcattgtcaccaccattatcatcacaactaactcttttatttgattccacattgataccttcttcttctactcgttcttcagcttcaaaatcaattactttccagatcactactattcactggagatacctccctttgcagagaattattatttgaacctaacttcatctgccactgaaaattgaataacatcaacatttccatctactccacgatcttcaacaaaattatcctcaacaacatgatcttcaactacatgatcctcaacaacatgatcctcaactacattatcctcaacaacattatcctcaacaagatcatcttcttttctttgttgatcaatcgcttgataaacagctacgaaaattattgttccttgttctaataactttatcatttgctacaacttcatttccttcactttcatcatcatccccttttacatcctcaatataaccttggaaattaatatctttcaaagaattgataattcttcttatcaaaacgtcttcaacagggcattcacagcaactttcgtgttctgaaccttcaatgttataaaaactcaacatttcatctgtgaaacaatggctttttttatcaataaacatacacacacctttgccacgaattctacccataccttgaataaatgttacaacatctggaatctaattatagaaaataaccaattgaacatctgctgaatcaataccattggaaataaattttgtaccaaataaaaccttgttattcgaatcacgaacaaaagaatctataactgcatccttatctggagaattaccgtgaactttcaattacaacctctttttgatcaaaattatcaaagcaactctcaacatcagcaatgacaccacaaattaatcgtcttttctaatttaattaatatttagtttcattgtttcattatgtatttataatctttgattttcaatgttgtacttattaattattttgttgttcagacagattatgtatttctgttatattattcatttgctcatattattatgttttaatttttattatttccctttacacttcagttgtttgggattcgtatttatattggataaatagttctctgtctaattgattggtaattggctctttattctttcttttctaaggtagccgacatcatgattatcctttcaaatttattcaaatatgcattaggtgaaaccacgttaatgcgttcttgtttcttttaaaagaatagtatgagcttcatcgataaccagcaaacccaaataagacttatttatcaaaaaggttgtatccttgacattttcataagttcccaagtatacatcgtagtttctatctgaatttttgctgattatatgaatacgaccactatgtggaagattttttgtatcaactagttgtataaacagattatgtatatatcatgtatcgttaattatttaatattttttgtgtgaaaaactgtaagtgtagaccaaatgaaaatctcaaaatttttttctcttaaaataaagatcaaatcttttttcaaataatttcccaattaaggtctttttccacttttttcaaccaaaaccacatacaatgtctgaattacatgaactatgctatcttaaaacaagacctatcactaaggaaacttatattgatccacttaaaggatatttaaaagctggaatacctgcaacttatacccttgaagaagcatataattatgaaaatggaattgaagaggaacaatcaagtacaactactccaatgcatattatttgtgaaagtattccatcagatataaataaggatgaagaatcggttgttttacaaatgatggaagaattatggttaaatggtgcaggttggtgtttagttaatgaaaaaaatgaaactcctggttgtgttttacttagacgtggattacatggatcaaaatattgggaaagttgtgttgattcaggtgtacgtgctgaagttttattacgtaaattgaatgatccaaatgttgaatttttagatgatccaaatgaagaaattgaagaagatatcgtagaggaagcggctcctgttgaggaagaagtgcctgaattaactgaagaagaagttgtaattgaagaatctcaacctggaagcaaaaacactaaagaagaaagtgttgaagatatgtataatggaccagctggtgcaactgaaacatatttaaagacagaattagaatataaagatggatgcattagttacaaaggaaggttctgatggtgttatgatgcaatgggaagatcaattaatgaaagcaggttgtgaatcaatgttcaaatcaattgaagatccaacagatgttaatatagtaaatattggatttggtatgggtataattgatacaatgattcaatctaaaaatccaacaaaacattatatctgtgaggcacatcctgatgttttaaaaaaaatgagacaagatggttggtatgaaaagccaaatgttgtgattttagaaggtaaatggcaagatactttaccttcattattaactgaaggtgtattctttgatggtatttattatgatacttttagtgaacattatgaagatatggttgaagatttatttgatgttgttgttggattattgaagccaactggtactttctcattttttaatgggattaggtgcagatcgtctcgtatgttatgaagtttataaaaaagtggtagatattgatctctccaattacggattaaatgttgaattccaaagtcttcctgcaccagtaactacattagaggaagcagataacagtgaagactctgtatggaaggatatcaagagagcatactggcgttgtcctgtctactaccatccagaagtaaggtttatgccttaggtgtagcatattacgtaatcaactgtaattttttcaaatttttttttttgtcgacgatttcaaattattatcttttttgatgaagattggatgaatagattggaataattaatatttaagatttgatctgttcttctccctttcttaagtaactgtagatcaaatatgtctttagaagctgccttatctcttttatcattggctgaacctactccagaaggtgcattagcagtcaaatcacttgtttttaaaccaaaaactgctaaaactgcaactccaattcctgttattgtagttgcattaacaacaactcaaactccttcaggtattattgcaaaatctgttgatgttaaagatccaagattagcaaagaatgatttaacaactgaatttttcggtgttgctgcagctgatttctcaattgcaactttgaataataatcatactgatggtaaagttaagcttataattgattccaaaattaatgataatgaagaatctcaatatgttttagaaaatgcttcaggtaaattagttcttgatggtaaacaattaattggtttcttatcaacttattctcctgttattgttgattttgaagctgaagctgcagctgctcctgctcctgttgctaaaaaggcatctgctgctccacaacaagttaatgatgctaaactagatgatgctaaattaattggtgttaccgttgataaagagaaagatttctcaggttggtatcaacaaattttaacaaagggtgaaatgttagattattatgatgtttcaggttgttatattatgagacctggatcttatgcagtttgggaacaaattcaaaaattctttgatgaaaaaattaaatctgatggtgttgccaatgcttatttcccaatgtttgtctcttcaaaagttttagaaaaggagaaagatcatattgaaggttttgcacctgaagttgcttgggttactaaagctggttcatcagatttagaagaaccaattgctattagaccaacatctgaaactgttatgtatccatattatgctaaatggattagatctcatagagatttaccatttaagatgaatcaatggaattcagttgttagatgggaattcaaacatcctcaaccatttttaagaactagagaattcttatggcaagaaggtcatactgttcatttaactcatgaagatgcagaaaatcaagttttaagaattttagattggtatgaagaaatttacagaaccttattagctgtcccagttattaaaggtgttaaaactgaaaatgaaaaattcgcaggtggtaaatttacaacaactgttgaaggttttatcccaactactggtagaggtattcaaggtgcaacttcccatcatttaggtcaaaatttctctaaaatgtttaacattactgttgaaaatccagaaggttcagataaaccaaagattttcactcatcaaacttcatggggtttatctactagagttattggtgttatggttatgatacattccgataacaagggtttagttatcccaccaagagtttctcaatatcaagttgttgttattccagttggtttaactgcaaaaactactaaggaagttgaagaaaatgtttactcatcatgtaaagatttagaatctaaattaaaatctaatggtattagagttacagctgattacagagataattattctccaggttggaaattctctaattgggaattaaagggtgtcccagttagattagaagttggtccaaaagatttagaaaataaatcagttcttgctgttagaagagataccggtgaaaaaacatcaattaaattagatgaattagatgttaaattaccagaattacttgatgcaatacacgaaaacctgtatgaaactgcgaagaataaatttgataaccatagaattttagttcacgaatgggatgatttcgttcatcaattaaacaaaaagaatgttgttgttgctccatggtgtggtgttccagaatgtgaagatgatattaaggatggttcttcaagacaagataatggtgaagaatttgaagttgatgaaaaagctccatctatgggtgctaaatctttatgtattcctttcgaacaaccagaattaaagaaaggtacatgttgtgttagatgtaagaaaccagctgttaactataccatgtttggtagatcatactaattgtgtttatagaatagtattgtttatatttttatagctgaaaaaattttaatttatgtttataaatgaaattaattaataaaaaaaatattaaagaatgaaataaaaaacaataagaaatagatagagttgcaaataataaaaatgttcatataatgaattattatgtgaatgtaacctgaattaccaaatttggaactcatcaaagtaatcaacactcttgtcccaattagtgacatgagatgcaagtgtgtgtctgatgctgtccatcaaaactggtgggaccacatgctgcaataccaatggatgatgatggtgagtctctgaatagttgaatcaatgagttcttcaatatttggtctgacgtagaatatcttgaaattaccctttgaattactcaaagctttaagttcaggtagattccttttctgaattgtctgtactcaaatctgttgtttcagtttcaggtgaggaattgttcaacggatgtgaacctgctttcaccttgttctctggttatgtaaacttcaacatcaatgttgacattcttaagtaaattgtgatatgctttgataccttgtaatgtttgactgatccaaattaacttaccgctggatacttgggtagcattctctaaaatacctggaacaccggatccacctgcaattaacaactgcttcatcatactttctttaatggtgtagcaacattgtccaccatatggaccttcaactgacaccttccatgtcatggtattagttgttcttcaatagcttgttccacattctgtatgtaacacccttcttaactctaatatatgcacataaattattaccttcaacaacaatggtgaatggatggttttcccaaaatatgatacctgcaaaataaatgtatgcatatgtaccaggttgatgacgccaccaagtaggttttggaacttcaaccttgaattaactcatggtcaccgacaactggtaagctgtagcagttctataaccgaaagcaaacatacgtaatgacacgtagaattctatcaaatgcccaaacacaacaggtagcaattcaaccattctaaccaacccaatgtattacaatgccaccaacacatagcaacaaagataacagcaaaactaacatgcacaacaaggaaatattcataatagaaaactctaaatggtggtaatgcaaataataaaataagaccacagaaaatagtagcaataataccatacacaaaatatggctcagtgttaatgtaaagaacgtaataacctaatgaattaatagtatatgcaacagagtggattaatgtatctaatgacatccaccaagcgacgactttgtggaaatgaaggaatgttgagtaagaccagcctgtaatccaaagaaggaaattgtttctacctgcaaataaaactaagagtgggattttaccaaatgccatgataccagtacgatcagcaacgtatctttgccatgcatgttctggagtaccaaaccaccaaccttctttatatctataactgacacaatagaatgcaatttgtaaaccaaaaaggaaaacatctgtaataaattgaattctgtttggaaggaatattgggaaccatttagaaccccaaaattgtgaaaatttaccatttggaaacattgttggaaatataacatatttttgacaaagctttgcaaatgatgagttgttaattgattttgtgacaccagcatatcttgcaaaattaaataatgcactgataacaatcaataataaaaagtatccacaaataccaactgaaaaccaggtacctgaatctaaattaaaataataagctttgtaaccaatatattctggacctaaagcagtcatatttggagtagttggataataaattggtaaagagatattagtaatttcttcaaatggtttataatatttagttgcatttaaatattgagcttcataaaatgtccaatcttctaaataggaagaatatttgttacaagcagttgaagcatattcaaaaattttctttctaaaagcttctgatttatcatcaggccattcaacggcacaaataagaatagtaccagctgctggtggatagccacaaatagcatcataaaatgatgaatatgaacctaacatcaagggtgtgtaatcaaaaataagttcactaacacctgtatcacaagtccaatactctgctgcaccaataccttgacccatggtggttttaatataggtagcagaggaagtgcttacccatgcaaacagcaatgtcaacaattgtaaaattaacattattgttgtttcttgttagtaagaaatgttctttgatttttgaaatatttaaaatagaaaaaaaaagagattaacttataaaataatagcaaaaataaaagtttaatccaaagcttctgaaatgcttatattaatatttagagcccaatcttctcctttgaaatgattagacaaatttcgaaaaattggggcatttgaaatacatggtacattataaaatatggagacagtttttcaattgacctgttaaaatagtttgaatagcaaaacaataaaagatgataaaaggaaggtaaaataatgaaaagccaattaaatacaaaattatcgcaataatattggtcccaatgaatttaagaagagaaaatagggttcaaatcaaacgttaaacaagaatttactcaactgtttaaactgttgcaaatagttgttacataatattttcatttttatgtccgatatctttttttagtgccttatgttttgcaaagacataaaaaataccccttaaaaatttactaatcatcgcttgcgtacattttatattattatacggtattgataattctagaagtattgttacattttaggccttattgttgtacatgtatataaaagtagtacggcactattttgtttaaaacactgatatgatatgaaatgataagaaatgaaataataagaaatgctataagatagcatattcatcaaacactcattagtctgtatatgatattgtaataaagtgccattataagctatcatgtaagcttggtataaatttcaattgtagatgaggagggtgttaaacgaagtgattattttactaaatcattaaaatcccgttttaagtcttgtgccgttgctcctaacgttcttgcctattattaatgagtgattttattttctaatcttctgttctattgtattgtattgttacttattctcagtttcttatttgataatctttgcacttttgaaatcaaccttaaagtaataattattgtctaatagtataagagagcagtaatattaaacttatattgttaacaccgtgttttcggatataagaaaatctcactatttttcaccgcttaaagaaaatttactaatatgaaatttctacaacatgaaatttataacatgcattaatgaacaatccgaagaaaggttgaattaatatttcctattataggataaggaaagataggaaactactaatgatattgtcttttcctaaaaaacaatacttatcaatagctagatcattaagatggtcatccacttcatcttcaaataatctcccattatgtgtaaaagatatcttacaaattaatactaattcaacacctgttcaattaaatggttggattgattcttatagactctctaaaaatgttgcatttcttgatatagttgatggaacaacttcagaatctgttcaatgtgttgtacgtcctccatctttattacctaaaaatattaaatctggttcaagtgttaaaattgatggtttatggtgtgaaggtcgtggtaaacaaaattttgaattacaagtatcagataagaataatactggaaattcaaaacctgcatcaatcgaaataatagggaactgtaactgatttattcccaatgataaataaaaatcatacaaataaatttttaagaggaataccggaatatagattgaaaaatccatcattgtctgcacttttaagatttcgttcacaagttgagacaacattagttaattttttcgattctcaaaattttacgaaaactcatccaccattaataactgcatctgattgtgaaggtgcaggtgaattatttaaaatagaatctgcatcaaagatacctaaaaatgaaaaattcttcggtaaagatgcatttttaacagtctccacacaattacatttagaagttttatctgctgcacttaatagagtatggactttaacaccttgctttagagcagaggaaagtgatacaaatagacatttatctgaattttggatgttagaagctgaaattgcattcatagatgatgttaatcaattaacaaattttgcagaactcatgattaaatctgttgttttaaacctaacaaataatcataacaatatgggaactaatcttataaacacggttgataaatcattagttgatataatgaaaaatagatggaatatgttattatctaagaaatggaattcaataacatatactgaagcaattaaaattatacaaaatcattatgataatgagaataatacagctgagtttacaataagaccaaattggggggattcgttacaatcacaacatgaaaaatggttagctggtgaatattttcaaaatccaattttcgttactgattatcctttagctgaaaaggcattctatatgaaaattaatgagcctggaagagatggggaattggataaaactgtagcttgttttgatctattagtacctgaaattggtgaattgattggtggttctgttagagaatatgatttaaccaaattaactgaagaaattaatagaagaaatatggatatcactccattacaatggtatctgaacttaagagagaatggatctgttcctcatggtggattcggtatgggtttcgaaagacttttacaatatttaagttgtaccaataatatcagagaagtcattccattcccaagaagtgctaataactgtttgtgttaaattttgtagtatacgccttgtaaataatatagaaacctttttaaatagaatttaatgaacggaaaaaaatatgattaaattaaaataaagctgtacaaaaaaagcattatgtattctaaaaacttagaaatggaaagtaaatataataaaagtagaaaaaaataataatgtgataaaataatgataaattgaaaagtgaatattataaatgtgataaaataatgatgatgtaaattaccaaatttggaactcatcaaagtaatcaacactcttgtcccagttagtaacatgagatgcaagtgtgtgtctaatactgtccatcaaaactggtggaccacatgctgcaataccaatggatgatgatggtgagtctctaatgtttgaatcaatgagttcttcaatatttggtctaacgtagaatatcttaaaattacccttaacattacttgaagctttaagttcggtggattccttttccgaattgtctgtactcaaatctgttgtttcagtttcagtgaggaattgttcaatggatgtgaccctgttttcaccttgttctctggttatgtaaacttcaacatcaatattgacattcttaagtaaattatgatatgccttgataccttgtaatgtttgactgatccaaactaacttaccgctggatacttgggtagcattttctaaaatacctggaacaccagatccacctgcaattaacaacgcttcatcatatttcttcaatagtgtagcaacatttcctccgtatggaccttcaactgacaccttccatgtcatggtattgtttttcttcaataacttgttccacattctgtatgtaacacccttcttgactctaatatatgcacataaattattaccttcaacaacagtggtgaatggatggttttcccaaaatatgatacctgcaaaataaatgtatccataggtacctggttgatgacaccaccatgcaggttttggaacttcaactttaaataactcattagccaacaatggtaagtgtagcagttctataaccgaaagcaaacatacgaataacacgtaaaattctatcaaatgcccagaccgcacatgccgcagttaaccattctaaccaacctaatgtattacaatgccaccaacacataacaatgaaaagaacagcaaatacaatatgaatgaataaaaagtattcatagaagaacactttgaatggtggtaatgcaaataataagatggcaccacagaaagtagttgctgcaacaccgtatgcataatatgcatcattttgcaaataatagacataataacctaatgagttaatagtatatgcaactgagtggattaatgtatctaatgccatccaccatgcaagtactttatggaaatgaaggaaagtggaatatgaccagcctgtaatccataaaaggaaattgtttctaccagcaaataaaactaaaagtggaatcttaccaaatgccataacacctgtacgatctgcaagaaatcttcgccatgctttttcatgagttccaaaaacattaccaattttgtatctataatcaacacaatagaacgccatttgtaaaccgaaaaggaaaacatctgtaataaattgaattctgtttggaaggaatattgggaaccatttagaaccccaaaattgtgaaaatttaccatttggaagccatagttgggaagataacatatttttgacaaagctttgcaaatgatgagttgttaattgattttgtgacaccagcatatcttgcaaaattaaataatgcactgataacaatcagtaataaaaagtatccacaaataccaactgcgaaccaagtacctgaatcaatattaaaataataagattcataactaatgtaattaggttcaatagcagttagatttggaagaattggataataaagaggtaatgaaagattagcaacttcttcaattggtttggtatattcagatgcatttaaatattgagcttgataaaattcccaatcttcaatatactgaagaatattcagcacaaaagaaagccatatattctaaaactttttaatttcattttctcattatcatcaccaactaaaccaactgcacaatttaatgcagtaccaacagctgggggataaccacatataacatcattacgttttgaataagagccaagcattaatggtgtataatcaaaaacagagcttgcaacaaatctactacaggcaccaaattcagctgaaccagtaccttgacctaaatcagtatggaattctgtaccaactgcatttcctaataaagcacaaaatgtggtcagtaaatgaacagacaacatgctttttcgttcttgatcaatgaaacaaaaacttttaaaaatcaaagaagtaaaaaatatagttttcaaataacattaaaatatttggtagccatagattataaaagaaaaacgaatttaacgtctcttttaaagaaaaggtgttgagcaaataattttaagaaactgaaattttaagagtattgtgtttctgaatattgtaaaatatctaagctgtgataggtctaagattcaagaaacgaaaaaagggttcaaaacagctccgataaaagttaaggtacagatattctcactatcatattggtcccctagaatatcaaagggtccatcccggttaagatctaaattataattcccacaataacaataaagatgaaaagtggctgtggtccaattcaaggttatctccggtgtcttgcggccagattctatataccccaactatattcggtaattcaattcttaaacctccaatcatttctcttgaaaaaaagttttatctttattgtattgtcttcaactggatcaacagttaacatgctagcagcttgtgacgataagtttcattttagtgtctccacaaaaaacagaaaaaacagaaaaaacggagagtcatgagataaaattactcccggattcaaaatttttaccggtggttgaaactaaagttatagcggacttaactaagatacattcgacttttacatattactagttatagtcttacttgattaaaaaaaactgtatattcaaatctctaattatttattttgttttttattgcttcccattttaaactcaaacatccaattgtttcacccaatacttattatacataatctctttaaactttcacaatctatttaaagcctcctatttatcccacaaaacacttaaaatcccaatagaagatgaaataacatttataagtgatactagtcgatcaacaaatcttgcagaatttatgtttaaatttgtcgttttaaacctaatcaataatcatcacaatatgggaataatataatagatacagttattatattatcaaaaagatgggaatcaatagcatatatatatatatatatatatatcatacaaaaccattatgataatgagcaataagaccaaattggggggattaattacaatcacaacatgaaaaatgactagctggtgaatatttccaaaatccagttttctggaaaagatggtgaattgaataaaactgtagcttgttttgatctattagtacctgaaattggtgaattgattggtggttctgttagagaatatgatttaaccaaattaactgaagaaattaatagaagaaatatggatatcactccattacaatggtatctgaacttaagagagaatggatctgttcctcatggtggattcggtatgggtttcgaaagacttttacaatatttaagttgtaccaataatatcagagaagtcattccattcccaagaagtgctaataactgtttgtgttaaattttgtagtatacgccttgtaaataatatagaaacctttttaaatagaatttaatgaacggaaaaaaatatgattaaattaaaataaagctgtacaaaaaaagcattatgtattctaaaaacttagaaatggaaagtaaatataataaaagtagaaaaaaataataatgtgataaaataatgataaattgaaagtgaatattataaatgtgataaaataatgatgatgtaaattaccaaatttggaactcatcaaaataatcaacactcttgtcccagttagtaacatgagatgcaagtgtgtgtctaatactgtccatcaaaactggtggaccacatgctgcaataccaatggatgatgatggtgagtctctaatgtttgaatcaatgagttcttcaatatttggtctaacgtagaatatcttaaaattacccttaacattacttgaagctttaagttcggtggattccttttccgaattgtctgtactcaaatctgttgtttcagtttcattgaggaattgttcaatggatgtgaccctgctttcaccttgttctctggttatgtaaacttcaacatcaatgttgacattcttaagtaaattgtgatatgctttgataccttgtaatgtttgactgatccaaattaacttaccgctggatacttgggtagcattctctaaaatacctggaacaccggatccacctgcaattaacaacgcttcatcgtatttctttaatggtgtagcaacatttcctccgtatggaccttcaactgacaccttccatgtcatggtattattgttcttcaataacttgttccacattctgtatgtaacacccttcttgactctaatatatgcacataaattattaccttcaacaacagtggtgaatggatggttttcccaaaatatgatacctgcaaaataaatgtatccataggtacctggttgatgacaccaccatgcaggttttggaacttcaactttaaataactcattaccaacaatggtaagtgtagcagttctataaccgaaagcaaacatacgaataacacgtaaaattctatcaaatgcccagaccgcacatgccgcagttaaccattctaaccaacctaatgtattacaatgccaccaacacataacaatgaaaagaacagcaagtacaatatgaatgaataaaaagtattcatagaaaaacactctgaatggtggtaatgcaaataataagatggcaccacagaaagtagttgctgcaacaccgtatgcataatatgcatcatttttcaaataatagacataataacctaatgagttaatagtatatgcaactgagtggattaatgtatctaatgccatccaccaagcgacaactttgtggaaatgaaggaatgttgagtaagaccagcctgtaatccaaagaaggaaattgtttctacctgcaaataaaactaaaagtggaatcttaccaaatgccataacacctgtacgatctgcaacgaatctttcccatgctttgttaggagttccaaaaagatcaccagttttgtatctataatcaacacaatagaatgcaatttgtaaaccaaaaaggaaaacatctgtaataaattgaattctgtttggaaggtatactgggaaccatttagaaccccaaaattgtgaaaatttaccatttggaaacattgttggaaatataacatatttttgacaaagctttgcaaatgatgagttgttaattgattttgtgacaccagcatatcttgcaaaattaaataatgcactgataacaatcagtaataaaaagtatccacaaataccaactgaaaaccaggtacctgaatctaaattaaaataataagcttcataactaatataattaggttcaatagcagttagatttggataaactggataataaagaggtaatgaaagattagcaacttcttcaattggtttggtatattcagatgcatttaaatattgagcttgataaaattcccaatcttcaatatatgaagaatattcagcacaaaagaaagccatatattcgaaaacttttcttttcattttttcattatcatcaccaactaaaccaactgcacaatttaatgcagtaccaacagctgggggataaccacacatagagtcataagatgatgaataagaaccaagcattaatggagtataatcgaaaacataattttcaatatcttcactacagataccaatttcagctgcaccagtaccttgacctaattcagtatggaatgttgtaccaactgcattccctaataaagcacaaaaggtggccagtaaatgaacagacaacatgctttttcgtttttgatcaataaaacaaaaactttcatgaatcaaagaaaatgaaatatttagcttacaaattatagtaaaatatttggtaatagttaattaaaataaaatacgaacataacgtctcttttaaagataaactttaaagcataatataattgaagggcactaaaatttttgaaagtattgtgagtatgaatattataaaatatctaagctgtgataggtctaaaagttaagtagacagcaatagaaaggaaaaaataataactcatttgaaaagaaacaagagaagacggtttcaaacaactccgataaaaaccaacgtacagaaattatcgttaaaatattggtcccttagaataataaaagggtccaccccaatatacgttcaaaaaaccctatatataattctgcataataaaataataaaagtggcccaagaacggaaataatactataatttactgttgccaacacaggttaactccgatgtcttgcggcaatacttacatccacactttctggagtttttactattactaatgttacatgttgtatattataaatttctaaattgataatactctattattactccgttaagttatgacagtgacaccacactttgaagaagaagtaagttgcgctatgtgcctttatttagatcagctaaatatttattaaattaatatattaatggaaatgcttatactttaaaactatacaaaagataattaatagtaggaaattcataaaatagaaagacgttctgttatatctctggacaccatattccgtacctctgtgtggttgtaattagctcttttattgtaacaaaaccatagtataattttatatatcaatatctttgacattatggctcttaaatttcttattggccctgtctaaactcttaatacacaatctatcaccaataaattcaaaattgataacctccttatcaccttcatctttattctcatcattctcaatatcaattctaaatgtaaatcttgtctttttcttaggtatcattcttaaccctccaatcatttctcttgcagaatattttatctttaccttattattatcattcttacctatacttatattatctttccaattattcttacgtgcaataatcattagtatataactttgtgattcccataaaacaatcccttcaattccaatactatctgaacataaacaatgagttactgtaaaataagctccaatatattcggcacttgataatttagctgtaattgtatcaatagtcttacatcctttaattaattcattaatataattattccataatatattcatctcaatataatcttcaattttcaatattttacaacaaatttttaaatcaataatatcttccatatctcgtatatctggattatttttgatcatcttactaagcttcttagaaacattatcttgatgtttaatagatgtttgtataaatttcttaaattcattctttgtctttaatttattaaatttattcgtggtcttcttattagaatttaaatttgataaaaaatcattaactgtttcattttccttagctatctttttatcattttcagctcgtattgctcccccatcagttgattcaagtactaaataatttttttgtggtccattaaatgaatatctttgttctaaaaattcaagtatttctccattaccattaaatcttccgcatctagataacaataaatgttcaaggacgttggatctgtccattatatatatcaatctttggtgtttattattatcaaaatcaaagtcaatgtcatcgatcgatctacaacctctaaaaaaaatttgcgacatgaatttcaaatatttttaatactgaatattacctaatcgggaatattatgagagcaacagggcaactgtcagttacaaatttgaaattgagggctcattcctaaattttataattgtgcactttttctttatatagattcttctatagatatacaccaatcaagcttaattaggtcctatcattacaatcttacttaagttttatcacaaaaggtgctaatgcaccacctagtgaatgtccagttaaaacaattttgtaatttgaattttcgtttgataatttcagcaaagtaggaaataaattgtcatatactggctttgcagcgtcatagaatcctttaacttctgataaaagaatgatatggaataggagcaaaattaaaatctaacaaccattcagtactagttgttgtaccttttattgagagaataatttctcttctataaacatctttaaaaattacaccagaaacaacaccacgacaaatattttcaacagtggcatcaaaataagaatcctcacataaagtacataaacaagcatcttttagattaccaaatttaagtaaattacccagtgtaagataagaaagggaagcataatcagcagctcttgccattaaattaaagacttcattactaattaaactagcagagacagaaatattatttcaaaaatctgatatactgttaataaataaagtgttgataccggtggtaaataataaaataatagtcattaattgaatcttggtataactataaaaccattagaattataaaaggaaatgaaccaaactcgtcgagaaattgaaaattcaattaagtgaagacatcatcaaaaagtctttttaacatgacagaggatcttaaaaatcaaataacaaatagaagataaagttttatataattcattaaatttaacctatatgtgacttttctatacctccccatgagacgagaaatcagggggctggaccaaaactaatgatacaatgatgaaagtgtacatgcactgttaaccagtgacatttatgcatagaatgtttggtcataaatatgatcaaataaatattcaaagtgaaatatttttggaaagaggtattttgaattataattctctggagtatcaaaaggtttccaaacttatcctttcattcattgaagataagtttgaagttgcattgaatgaacagaaagaaaaacttgataaggagaatagaagaattagcaaagcaaattttgatgctattgatttggctttggaaaatgtcagagttgtttaaaattctaagaaaatatttctcagaagacgctattcatctttatgtatctaatgtttggtgggagcagctagatgtttccattccaataaagaaaaattttataataataattttgaacctactttattgcagtataagaaattcttggatcctacaattttatcaagcattcaacataaactttttaaagaatctgttgtttaaatttcagatgttgaaagtttattagatactctgcatcgtgttgccactagttatgatatggttttatcagatgtaagagcagttggttctaaatgtcaaaagatgatagtcctttacttgaaaaaaaaaagggattgatgttgaatgaaaaaccaaaccaaaacctcatttaaacccattcccaaccaatttttctctcaattgtaagtaagagtattatttacttggttggtaaatgggtttgaataaagcttttgtttgttgttctgtagttcaaaggaaaagagctgagcattataagaaaatgagatgagccttcctcggtggctttttttatacacccgaattttctacttttctactttttaaaacttgcccctttcaattaatagcttaataggtatcatttaaagtaaagtgttagttattgtaattgtatagctttttcagtggccaaacccgtaaatttctttaattatttaatttgtataactaatttttatctttccgtatgatattgttttaaaaatttagaaactatctctttttacttgattctttatttttttggtttttaatacttttgatttttaacacaaatatttaattttctcacccaatagttactcaaactttttcaaactcctatcacatattttagaccttctatttaccccaataaacactttaaatctccataattccatcaaaaattctgtttttggcgcccaggaaatccgcaccttcactacgagaattgaaacttataaaacactaatataactagttgtttggtctagtggttacgacgtcccctttacacggggaaggtcgcgagttcaaacctcgcatcaactaattagctgtttatttttattttttaatttatgttacttatacatgaacattgctatttacaatttaccttttgaatttttacttttcaaagctattgccttaaatgcattttgaggtctttcatcaacccatcttgataatccattcatactttcattaacaatttgtaaattaacttgatcataaaattgtaatttaattaattttttattttcaaaaattgaatcaaatgataaatttttagataattttaataattctttaataactaaattattaaaattttcaattgaatcagttttaaaagttttagaaataaatccatttttaattaaattattaagtggtattttttcagctaaacatacagcttgtaaacttgttgttaaacctaatctataaggtaatgaagcgagaaacgccacattcattaataagtccaatacttgagaatgggaattgaatataacaattattattaatatttgaatcttccctagcataaattatatccattaaacaaattaatgcagcagttaaaccaataactggaccatttaatgcaacaattattaattttttatgatttaaaattctatgaacaagataaatattttttgaagaaatttcattaaaatattctaattttgatttattaattattttagagacatatttaatatttgcaccagttgaaaaaaatttaccagttgaagttaataatgtaattgaagttgaaatttcattatctgctttatcaaataaatcagctaattcaacgaaattctggaattgtaaatgaattcagtgaatttgcattatttatatgaatttcaaaaattggacctttaatattataatctaatgtcattgctagttgttatcaatactcatttttacaatacgatatatggtggatattcattactatttatacttgatattagaatgtgggggtgaatttatgatgattataataatttgtggggctcggtcaaataggggtaaaaattattttcattatttacatgatcttttacttaagttatctatctatacttagtatttatttatttaaattgataagatgtttaccatatttctttaaagcatctctaatttcaacaaatgaacctttactaccactaacacaacctttaactaaaatataaccattttctgcattacaatctaaaatttctaaattaaagattgtatttctttcattacctaatctacctgccatttttttaccaggtaaaactcttgcaggtgttgtattttgacctgttgaaccagctgatctatgagattttgaagcaccatgagatgcattaccaccaccaaatccccatcttttcattacacctgccatacctttacctttagtaacacttataacatcaacaaattgaccaattttaaaatgatctgcctttaattctgtacctaaaggtaataaattatcttcatttaaaatttcaaaatctgataaatattgttttggtgaaacttttgcatttctaaaatgacctaacattgatcttgtaacattttgaggtttttgataacctgcaccaatttgaattgaattaataccttcctttgttaaattcctcgtaaatgtaacttcattttgaataatttctaaaactgttgcaggtaaacgacgaccttgattatcgaaaaaacatgtcatacctcttttaataccaattaaacctggtctctctaataaacgacgacgttgacgtttactttccttattacgtgaagtaattggagcatttgaatttatataaggaataactgaaggtgaaattaattgttttgaagatttaagttcatttaaagcagtagtagcattagagatactactctgagctctcttaaatataaaagacattgtcttataaagaagtatattatatctataactatacctatacctattctattctattctattctaatattggaaaatgtcaatgtcagtggaaagtgaaaaatttattataataaaatattaaatatggtgtacagatcttattatatagtcgcgtctgtgggtctttttatttttcatatttttacttcaactacatgaatggttaatggaattaattgtttgctgtctttgatgatggtactttctttcttttgacaatatccccctttgccattggggggtattctccacatatgtttaggtgttgaaagggtttattaattatcaactaatgagtttcttaaattttctcgtctatcctgatgttccaattgaagtattgtagcatcaatcatattaacgtgaaattcttttgcattgaataaccttttgacatacgtaaccaaatttttatcacttgatacatcaaaacttgaatagccgaaaattaattgtgaaggtgaggtgtcaaaaattgttgtggaattattatagacattaactacacggaaaacataaataggccaatttgccatagtttgatcaacagatttcaacacctttttaattaagaccattgacatctttcaactctactattcgcttgcggataatattttgaactgaaatgccatttaatattgaaagccttagcaaattcttgagtacctttcagcaataaaaggagttccattgtctgataaaatctcttttggtcaagggtagtatcttgtaagattaacctagaaatgaaacaacagtttcagaattttgatatacaacagggaaagcgacacaataaccactcacgtactctacagcaactagaacatattgaaaatgagagacaccattattatcgaaataaaaaccgacatctaacagcggaccgacaaaatcaatatgccaaacttgaccaatgaaaggagttttaatctgttgcaatagagtaggtatttgtttgaatcttgtgaataaatcacaatgttttcaattcttgacaatgatggcggcaacagcttttgcttgtggataaaaaatcttattttcagcagctaattcaagtaaaacctttggacttccatgatacttatgatgtctctctaaacaaaacttggtaaactcagcagtagacacaacttttaataagtgaggttgtgaaataaaatacataattgaaataaattttgaatgaaaataaaaattgaattgaaataaacattatgttgaatattctttgaaagagtcaacaaataatcgctgatatattgaaatgaaaaaccataatattgataagcagggcgttaatgttgcaaattgtaagtgcctggaatttgttttccatgaacatcagttaatttgtatgaattcttatctaacatttccgaaatgacaaaaggaccttcaaaattaggattagttttatgatgtttagccaatttcttggtttgaacatattcaccaattgaataagtattatgatttgcctttggatcatttagtaatttcaaattttgtctagcaatgaatcttttgtcaactagactatttctttctctttttttttaagtttatgtatactttattagattttataatgaactttaaaaaaaactaaacatactgtacactcagtatacatgctataaatgatatgaatattaaaatggatatgattataatggagtataagggaaattacaatcatttgtactttcatcatcttcattaaagaatcttttcttcagttcaacaggttcttgattatcctcttcaggaacataaccttcctcaccgggtttaatttcacctttaccattatttttccaagaaccaccaaattgatgccaaacataacaatatttaccacaattatgttcaggatcttctctaaatgagaattttggataaataacaacatcatcaaccataacaggagctgataaacctgtgaaaaatttccaagaaatcatttcatttggttgaggttcaggaccatataattcaccttgaaaatatctatttgaatcaatatcaacaattgttggattatctaaagaatttaaatgaccataaattgtatcagtccaaacaactggaccagtccattccattatatcaattgatgaacatttatcaacacctttaaaatctttataataagcttgtaatttattattttttgcagcattaaaagttgtttcaacaattttagcaattaatttttttaaaattggatgtcttgcctttgccttaaaagtccattgttcaaattgtaatcttctagtcatataatgttcccaattttcaacattcatatcttcttcaactgcaacaacaaacccaacatttctatcagaatcaaaccaaatatcaactggtttctctaatttagtatcaatatctgaataaacaccaccgaaaaggaaaataagtaaatatcttgaaaaatcagattgaataattttatttggcattaaatcaaaagcttcaacaacttcaggaacagtatttgcaaaatgagttattaaaatatcatgaatttcagcatcagtatataaattatatttataagttggattttcatttttccaaagtgaaattaaatctctatttgggaaatctggatcacttgcaggtactttccacatttgaacgatatttttatcaattcttctaggagatgcatcataagggaaataagttgataatctatccaaagtagttttataattataaggatttgcacctctcgtatgaggattaaatctataaaaattagtaattgctttagaagtttctgatgaagataattgattaattgaaaataataaataacctaaaaatagaccaacaattatagaataaattctaaaacgtggtgcattggtaacattcttaccaaatactccagaataagaggaagacattgccaatagaaagaatacagaaaagaaaagaatataataaaatcaacatcaacatcaatcaacatcatacaatacaatacagaataattcatggaaatggaaaccaactagaaaatgaaaaagcgtgttcactatattaagcaactaaattcgcgattttccaattttcttttccattttcttcaattttggatattcagtaaacagatggttttgtacctgaaagtatatctttctttttaggcaatggcactggttgtaaggagatctagagtattgatactctttatcttagctttgatagtggtttcaactcttcttatatctaatagtaacagtaaatatatagatgatttaaaatcaaatgctaataactatttaaagtcattagacgagagtggttcaaataataagggttcaaataatgatccaagtatggaaaattttgatgaaactaaaccattatatgattattcaagagatgaaattaatcaaattaattcaatttcaattgattcattccttaaaggtgattcaataattcatgatttttttgcaaaatttttcaatttattaaatttaaataaatcaaattatcctttaaagagaagaatgaaattagatgataatggtaaaccttttattgatgatgttcattttttcgataatgaaaatgaattattaagtgaaaatagattattagaattattcgatttcccaaatgatttcgttaatgatttaactattaaagcataaaaaaattattaatcaaattccaaattttacacctaaattttataaaggtgatggttatgcaattgttggtggtggtaaatattcttggtattcatatcttgcagttaaatcattaagaaatgttggtgcagttttacctgttgaagttattttaccaacaagtgatgattatgaaaaatatttttgtgaagatttattaccatcacttaatgcaaaatgtgtttcaatggaaaatgttttcggtaaggaaattatggaaaaattaaattttacaggttatcaattaaaatcacttgctttattagcttcaagttttgaaaatattttcttattggattcagattcttatgctgtatcaaatcctgaacctttatttaaaagtgatttatataaaaaatataaaatgattacatggcctgatttttggagaagaacaacatcaccaatttattatcaaattgcaggtttagatatttcaggtcctccaattcgttttattaatgatgttttcactgatattgaaaaaattaatttaacaggtgataaaactccagatcaaattgatattaagaaagactttaatttacatgataggaaaaatactttaatggattggtcaacagaatctggtgaaatgttattaaataaaaatattcattttaaaactttacttattggcattatattataattttgatggtccatatggttatcatccattattatcacaaggtggtgcaggtgaaggtgataaggaaacttttgttgcagctgcaacttattttggattaccattttatcaagtttataaaagagctgataaaactcatggtttttataatcacttaaacacatttgaacatggtgcaattattcaatatgatccattaactgattataaaaatattttaaaaattgaagagagaattaatcatgatatgaaaattaagaaatcacattttaaatatgattatgccaaatatttttatgaaggtgataaaattattgattcagtaccaatgttttatcattgtcatgatccaaaatttgatccattctttttaattaatgaaaagaaaatgtttgttagagaaaataatcaagttattaatagaagacgtagaattttaggtgaagatttcccaagaggttcaattgatttagaattaagtttatgggaaattgctgatgcatcattatgtaaacaaaagatgaaatttacagttttcgaaaaaaatgattttgaaaatttttgtaatattgaattaccaaaacaattacaatttttaagagatagtcatgcattaattatggaaaaatataatagtgaaactccatatgaaaatcttaatggttcaaatgatttatttggtgaaaaaaataattagttttgtgtatttttctaataataataaattattctataataataataatagtactttcctacatcgcgttgtaatgaaatttttcactcttttaagtcattttaccttcatttacaccaaggatggctaattcaaggtttgaatatgttaaaagttttgaacgtgaaaatatattattaccacaaacacatataattattagagttgatggtaaaggatttcataaattttcagatttttataatttcgaaaaacctaatgatatcaatgcattaaatataattaatttatcagcaatgaaaatgatggaaacattccctgatataattttagcatatggagattctgatgaatattcattcctcttaaagaaaaattgtgaattatttgagagaagagaatttaaattaattacaacatttgcatcatttttcagttcttattatcaattttattggaatgctcaaaattcacctgaaaatcaacttaaaattgatagattaccaacatttgatgcaagagctattgtttatcctaatagagagaatattattgattatttttcatggagacaggttgattgtcatataaataatttatataatacaacattttggatgttagtccttaaaggtggtatgacaactcaagaggcagagaacagattaattggtacattaagtagtgataagaatgaaattttatttaaagaatttggaattaattataataatgaacctgaaatgtttaaaaagggtacaatttatgtacgagaggttaatgatttccccataggtaaatatagggagaatccaacaattgataatttacaacgtatattgaaaagaaataaaaagagtagtattaataaatatcattgtgatttaatcaaggaaagtttctggaatgatagaccttatttatttatataaatataagtataattatgtacagttatagaagacgaacttactctattgagcaaattctttaccattagttgaaatttcttctcttttaacaattttagctgcctttgaaggacttggccattgatcatgaagtatacctgcctttttcaaaaggaaagcaacggtatcacttggttgcgcaccaacagatatccaatatttagccctatcaaaatctaatttaatatccttaactgggataacacctcttgatgacatttcaggtgttattggagtcggtacaggattataggtaccaataacttctattggtaaaccttgtaatcttcctctctttttaccaacggcaatgttatatactggttgacgagttctaccctttctaaccaatctaattctaactaatcccttcattgtctagaggaaataaagtaataccttaacttaatagaagatgtccaataatcatgaaaatattcaacatgtaaaaaatgagacaccgtacaccaaaagaggaagtaaaaaattttttatttttttatttttcttaacatgtaagaatttttcacttgttttatttaaagatctatataatttctttactttggtaggcaatatgagcactatggatgatgctaagactgatcatttgattgccattatggatatggatgataaattggccaaaattagaagtcaaatcaattctaaattagaaaatcaaaaaaaattagcactagtgttaactacaattgaagataatttaaaacaacaaaatcaatctgcaactccaattacttattttatctcatttttaactttattagatcaatgttgtgttaataatgaaattaatgatttaccattggctacttgtgctttatatttcttagatttaatatctcaatatactcctccaaaattattaaattctaaattttcagatattttagttagaattgctcctgctttaactaatgaaaatgctgatgctccattaattagatcttctattggatttttagaatctctcttacttgctcaagattggaaatcttggaataattcaaataattataaaatttctccaaagagagctttatctgctcttttagatttatcacttgatccaagaccaaaagttagaaagagagctcaagaagcaattgttaatattttaaagaaaaatcctaattcaaattcagattcaaaaattaagaaagatcatccagctgctaattatgcaagtgaatttgctttaaataatttaattactttaattaatgataaatcaattactaaatcaaaacatcaatcaaaagattcttcaaaggaatcatctgcaaatccttcaattatacataatttacaattaattactttaattacatcatcaaattcttggcctttaaagcaaattactccattatgtgatattcttttggaaatttgtaaaagtgctgatcaattcttaatttcttcagcatttgcagcttttgaaggtatgttcaaatcaatgactaatgaaatcgattcaactaaatttatacaagttttagatataattttcgatttaaaaccttcattaaatgatcctcatttagctccttcttggttagcagttattgcaaaggcagtttcatcattttcttcaaatattaattcattggaaattttattgaaattaccaactattttcaaatctgttggttcttatttcttaagtgaaaattcaaatataactgaaagtgcatctcaatgtttaattgcaattattgttgatggtataaatgataaagatttattattacctccaattgttaatgatgaattatttggtaaagttgataaagttattgaagaaattgctaaagcaacaactgattatttaactgttagatatagacattccgctaatgatgtttgtgaagttatatctgctttatttgttaaattaagaaaaagagctaatccttatttcttatcacatttagaattaattggtaattggagatcaaatgaacaagaaggttttgaattaaatgaaatttcagaaaaagttattgcaagtgcaatctcttcaattggtcctgaaattgtcttaaatgttttaccattaaatttaactgattctaaaaaaattggtagagcttggcttttaccaattttaagagataatgtttcaatgtctgaattaacttattatattaataatatcttaccaattactgaatttttcaataataaaattcaatcatcaaataataatgaatctgttaatattaaaatttttcaaacaattgttgatcaaatttggtcattattaccatatttctgctttttaccaactgatttacaaactgcattctctgatgattttgctgctaaattatcaggtttattatatgatgaagttcatttaagaccagttatttgtaatgcattgaaaaatttagttataactgaaagagaacgtgcaaatgaaactagtgaagaaaatgatgttatacttgaacaacaattcccttcatcaaaggcaaaatctgatttagattatttatcaaaaactaaggcaaataaattattatcagttttatttaatgttttcactcaaattccaatggatcaaagaaattatgttgcagaatcaattgaagcttattttacaatttcttcaatggatgatatggttgcaacttttaataaagtttgtacattattaagaaaagctttagatgatgaattaaaggatggtacattaacaaaggaagataattctaaaacttcaagtgctagaaattcaattccaaaattatctgttacaatgatggatttaattgttatgatgactaaatatattccatcagattctcataatgcattattaacaattttcaatgaaactgttcgtatagaaaattctcaaattcagaaaagatcttatcgtattatttccaaattattagaagataatgaatcaaattcttcaactattatacctttaattcctaatattatgcaagttttcattgaaacttcaactattactttaccatctgcaagagctcaaagattagaaggtttagaaaaattaattaaattattaccaaaggattcattacattatattacaggtattttatctgaagttattgattcaactagaagtgcaaatgaaaaaacaagaactacatcatttacattattaattcaaattggtaataaatttaaggaatgtcaaggtgaaattgttaaaaatactttaattgattctgaaattcctgattctcaagcttcaattcaagaattatttttaatgtgttgtgcagctgcaggtcctgaaaatcctcatcaaagaagtgcagcaattactgcattatcatgtattttctatgaatttcataatgatttagaaatttcttatcaaaaggaattaatgcaatttgttgaagttttcttacatcaaaataatagagaagttattaaaccaactttaggatttatgaaagttgcaattttatcattacctgaagaagaagttttacctgaattaaagggtttattaactgaatttttattaattaatacaaatcataaaaatcattttaaatcaaaaattaaacatttaattgaaagattaattagaagatttggttttgatgtaattgataattatattcctgaagaagataaaaaaattattaatggtattagaaaggcaaagaataaggctaaacgtacaaaggcagcaaattcaaatgaagaaaatgatgatccaaatggagcaggtaataaaacttcaagactttcagcatatgataaagcattatatgaagattctgattcagatgattctgatgatgaaggtgaagaaacaaccaaatccaacaataataataaaaaatctaataaatcaaagaaatcacaagatcgttttatttctgaatcaaaggatgcaccacttgatttattagatgaaaaggcactttcacatatttcaacttcaagaccaaagaaatttagtaagaagaatgttgaaaaattaacaggttttaatacaaagaatggtaaattaattattaatgaaaatgaaaatgatgatattttatcaaataaaaattcattaaatgcatatgttgaagctgttaaacaaggtccaattagaggtcaaaagaataaacttaaatggaagaaaactggtaatccagcatgatgaaattgattggaattctgatgatgaatcaaaaggtgataaaccaaagaatggatttaagagtaaaggtggtagaattggtaaatcacaaccaaaatttaaatctaagaagaagttttaatttatggtgaaattgtcatctcttttatagattcatattaaaacttatcataatctacactgttttgtttttacatttgtctttttcttaaatttcttttctatacaaaaactatttttatatgtacatactaattagtaaagttttaatttattttttaaaaaaaacatcatttggaatgtaaattatccaaataagtttaaatcatttgatgttgcatcatctccttgaccataaagatcgagatcttccatttcatcatcatataatttatgatgttcataataatcataagctgctaaacctgaattagtattattgttagtaattactatcattattattacccatatttatatcattattagtaccattattattgttctcattaatatcattcatattataatcattatcactatcactgtcactatcatcattttcatcatcacttttataatatgggaatgtatgtaataatttttctgaaattggacctgcaataataaaattattattattattaatatcatttttacgatcatcatgaacaactttttgtaaatcatttggtatataattttctaaaactgtacctttaaataatgttggtttaacattattagtttcagcatttttattatttgatgtacttattaaatttgaatttgaactcgttactgcaactccaccattcgaattagtttgtcttatattatgtttttgtgttaaaaggtacgattgaatttgatctcttattaaatattgaatccaatcttcctcaattgcactttgaggtatttcataatcatcttcctctaaattatcatcattactgttattgttattattattaaggttattattattattaccagataatgaactaaattgtagaaaaggttgagccgttggtgttaatttattgatttgtgaaggtgatggtaaatatggcattgttggatttaataattgtgcttgttttgattgctcatctaatgcttttgttaaactatccattttagaattaacatttaatgcattaattttagattttttacgttcctctaaaaattctctatttggtctaccaacttctctcatacgttcagttatttcactattaaaccatttctcaaagttatcaataccttttaacgttataggatttttactatttttatctaatttcttattcggtgtgaaaactcctaattctaaaaatgtcctacttcaaatcttttatattaggatgataatctcctcgtaattccatatacttaacaattgttttaactaataaatcaatatatctaattgcaatatcagtgaaaatttcaataattctattatttgcagctttatcaaatccttgtgcttttaacatttgaacaattgtcatttccaaaagatggaaataaaatctatgctttgacatagttagggttggtatataatgtatgttatgctgtgataaaaaaaataatataattctataaaacaaattctcttgcaagttgttgattttataaaattagatgaaaattcatgtagtgagatttaaaactaaaaatatgcaaaaataaatgatccctagcaggatcgaactgctgatcttggcgttattagcaccacgccttaaccaactgggccaagggatcctttgttgggggtcctttttggtgggtattcttctaattggtttgtaaaaatggccaccccgccaaaatggctttttagcttttgtgaacacttctgaagggttgtaaaaagtattagtgtacggtagaaaattttaaatttcaaaaaactctaaaatttgtaagatttgttgaagattttaagttttgccaaaactaccaaaatataaaatgcaagcggtagtaagaagctctttaagagtggacaaaacaatgtgtaaagtccaaaaaaaatcaacgtttttattattacttacatctatctataatgtaaacaaactattctatactattctatactattctatactattctatactattctatactattctatactattttcatcacttttacttaaaagatcatgtaatttaacaaatctatttaactctacctctatcaaagcagccttaatatttctttgatcttgataatctttaaattcaattaaattccttaataaaaaattcttcattctatcaattggaaaattatccggtactttatttataatttcaacaaaattatccattctttccattgtttttgcatttgaatctgttgaatcattaagtaaatcatacttattcagaaagttatcaattagtttagtttcattggatttaagatatgaatcaaatattttctttaataatatttcagttgtttttctcttatcattattattgtcattattttctagatcatcactcagtaaagatgtagttttatttttcatatcaacacttttcaaaatattttcatctattcttggtaattctaattctacagcaaatatttcaacagttgaataatctttcaattctattaaataatcaactatttcttcatattgggcagatttaaaataaatcataattgtaattaagggaagtttattcaatgcaccatcattattaattaactccttacatatatcaataattgattgttgtgttaaaatagatttcatatcacgattcatattatgtaataacgtatacaatttatcatggtatccaacaagtggcgatcctttaaaatcaaggtttttaataatattccaatatttgtaaacactaagtttaggaatagatttctccttatattcaattattgatttatttaaatttttttcaatttttgaatcattttcataactaaacattataatttttaaataaatcagtattaaatctccaataaattgtttctcacacttaacttcaacaatatattccaagtattgtaattgtaattcatttttttctttattatttaatttatcattattatttattgagttgataattttcatataattaatatctaaattattaatcttttcctccgttattaaatttaacccatatttaggataattattcaataaccattccgcgtatctttcaactatttcattatcttcaatacaattagtataaatataattgaccaacacttgtaaaggtttattaacatctgagaaaattgaattaaattcttcatcttcaaaagttccatcaataagtcctttccagtaatataaccattgtctatgatttttcaactgtgtataaaatttagaaagaatataatattttttatttaataataacaattcaattacttcatttgatgaatgtttaatttcatgtattattggttctaaatcttcttgatttataattgcatttttaactaatgtaacttcaatactttttttaattaaatcattttcatttttaaattcaacagttaaacatgtattaaggtataatttaaaaaaatcattcatttcaacatttttctctattttctttagttcttcaacatattcgaataaacattggaaagtccaaactgaaccgtaaattccatttgatgattctgattcattagtgaagatataaatcattagtcttgggtctaaatgtttaaaattagatacccaaacatcaaatgcttgatcaaataattgatattttaaactgaataatgccattaaagttattaaaaatacacttttattatgtttagtaaattcaccaactaatttatcatgaatattttgtgcattatttgaattagattcactgtacattttcaaccatctttcaatttcagatattggttttaatattttgaaaacttttccactggaatcatataataaacatgatgatgtacaaaatgatttctttaatgcattatcggattcaattgctattttttcaatttcttcattagtcatggttgaaacaatcggtgcaagagttatcttagatgttaattcattatcatctattcgaaatattttacaagttaaaccagtatttaatttaatatctttatcatttatagttattgtctgtaattttgtttgatcatatattgagaatatttgtatttcatttttaataattgctataatatagggtaattgaatagatattgaactagggtaatgatcgaaagttaaagtacctctaatgacatcaccatttaaattaataaacatccccattgcaggttcatctaaattcaatccaccacttataagtaaaatttcatttttatcaatatattcaataatgggtgtaattttaacaatttcatcacttgtagaagttgatactgggaataatggaaatttttgtgattttaaaacattaattaaatcataatctttaccatttgatacaattgcaaaatctcctaattggattcctttgataacatcactaaattctaattctttatgtaatcttatactatcatgaaatatccttaatagtctaatagcttttttagtaaataatgtaatattaataaatgattcaccataatattcttcctttttaacgatataattattttctttcttatccaaggtaaaataattccaatcaattgatatatccattacatctttagccttaccaatattagcaggtgataattcaggtaaaatatatccactcattgaattaccacaatgaattaaagcaattgaaatttcaggtaataataagattttcttaattggtttagagacggatgaagaaccaaatttttgtttagatatttgaatataacctaattcatcatcaattttatataaatgaatgatttcaccaaggttagtaccgatatataaattaagttcccatgattgaatacaagttatgtaagaatctgttgattcagttaatgcaatgggtatttccttcaataaatcaatcaattgatagggagtgtctgtagaatatgatataagggtatcaatgtcattaccaagtgattcatcagtcattggataaagaatgaatgttaagagaagtaccaatcaccactaccgatatacaatttgatgcggaatcatgtaatttttcactatgaagatcttctatctattaatctactaaatttcattttatacaaagtaaatggaatggagtgtttatatatagagtgtttatatagagtaaaactaaccgaataatttaagaccagattgctttaatgcagatatatcctcttgttcattttcctctacattatcattattatcactatcattatcattatcagaatcatccatattaaatttaacaccaaataaacctgcaaataattcatcaatttgatcatcattccatgaataatattttcttcttggtatatcgaattgtgcaattggttcttgaactgtatattttaatttccttcccctttgttgccattctatcataatttttttgcattttatttttcgataacattaaaattgctgaattacttgcttgcttttgatcaagttttttattaatcatatcatttaataataatttataaaaatcatcatcatcgaaaatatatggattaatttgtaaacttttatcaatattacttaaacctgcagtttgttcttcatcgaagtcttcatctgagtcctcatcatcattcctttctttttcatcttcttcattatatccaattggagttgcatttcgacgattaattttagtctttttaacaaatctttctaaatcagataattgattattaacttgagaccaaacagattgattaataacagaaaatttaccttgatttaatgcaccaatacctgaagctgattgaactctatttgaccatttattaagaacagatttagttattggtaccattatatcatcaatttttttattagtttcaagataatctgataattttctcttttttgaagatgataaattaatatcaattttatttttaattaaactatccttttgtaattgatttgctcttatattagttaatctttcaattaatgtaaataatttatcttcaattgtatttaatattttatcagatgattcagttttaactgattgatatgaattataattaattggtaaattatttgatgaaacaattgctttctgtaatttaattcttgaatctaaaattctatcatattgagcactttgtttaagaattgtataacctttaattgcatcagacttggcggatgttgaaagtctactaataatttgttgtttttcactttcaagtaatttttcaattttttctctcttatatgtatcttcatcagattgatagttagtttcatcatcaaatccttgaaattcttcttcctcaatgtcttcatcttgagatttttcatcatcttcttctgactcatcatcatcttcctcaacattttcatcatcttcactatcttcaatatctataccatcatcactttcactttcactatcatcatcatcatcattaccatcattattattctcaaaaacttcatttctaccaactttagaaccagtatacttcccaccaagtacatctgatctaatactactcttaccaacagacacataatgatctcttttatgaatatccttttcttcctcttcatcatcatcactaccatcatcactaccattaatatccttcccattatttttatctacaaaatccgcattttcaatatcataatctgcaactttaggacgattcaatttgtccataagtttctcacccaacatcttaccagatcccctagccatgtctctgtactctacagaaaagaagcagttactacctaaagacagtaaaataaaataaaaaaattttgaaaaaaaaattaaatttttcactttgattacataatactagctatatcttcatgttatcaagtttatctacaagagaagagtctttccttaagtttctgttcttgacacgactgttatccttagtaactgacattgcagcaactctatatctttccatctcttcattcttcttgacaactcttttcccacgtttctccaattgataattatcaaggaaatcatcaattaaatccataaaatcatctctctccttacttaaatcaaatggttgataatcatcttcttcactttcattattattatcatattgttcccttaaaacatcaaatttatcatctataattgtcatttgttcagttctacataatgcagatgatgacatagaatatgatgatgtatctgttgttgcacctttctttctctttgctttcttctttgatgctttggtattggatgattttaatttcttaccttgaatatcaggtaattctccaaacgtatcttcatcttcctcttcctcttcctcttcatcttcatcactatcgaattcattatcactatcgaattcatcaactttacgttgtttcttatatttagcaaaatctttctcccaattagtctctcctccttcctctacatccccaccaccttcataatcatcataatcatcataatcccaatcaccatcatcataagcattatcatcatattcatttaatgatatttcattttgcttcttaccatttaagtaattcatcgaaaacatcaatatcatcaatatcttgttcatcatctaaataattttcatcctctaatgcaattaatgcttctcttaaatcaggatttaaatcaggtttaaatccactaatttcatcaggtatatcttgttgtgtttgataattatatgatttaatttcttctgatggtaacatatcatcaccaaataatttacttaatgattttttctgattttccttttgcttttcagctgcttctttctttgatatgaaaataccacctgatgtaccaatatcttttaaatgttgcatataatcatattctgaatcatcgaataaaacaccataacttgcagctttaccttcattcttattctttaattcattttctaatgtatttaaatcaacattttcttctctttgaaattttttagaggttttcttattattactgttattactatttttctgttgaataggaactaaaacagatttagatgcagtatcatcataatatcttgaatcctgtaatgatctatgaaccacttgaacttaacagagttattcttatcgaatttcttcattgttcttgtcctaaaaaagaaagaaatgtaatagttaaagtacttattcagaaaaaaaaatattttttttctctcactataatggtatagtataggtatagctatatatcctcttttctatcttgtagagatcgtacactatggcagttataacagtacaatcgatatcaccagtgtatacatgggaatggaattgtaatgataatgatgaaatgtgtggaatttgtcgtatttcattcaatggtccatgtcctcaatgtaaattccccggtgataattgtccaataactaagggtaattgtggtcattcatttcataatcattgtgttaataaatggcttgatcaacaaggttcaaaaggtttatgtccaatgtgtagacaattgtttaccaagtagtttatgtcttatgtgtaatcctttcctatataatgtaatcaatgatcagttttacgcgggtgtaggatagatacccatactttactatgagtaatcttctttcagtagataatgagtacgattagttgttaagttaggttcatcatctattgttgatgatgtaactagagaaccaagagttgcaaatataactaaaattgtagaagaattagttaaattacgtagaaatggtaataaaattgtactagtgtcaagtggtgcaattgcaatgggattaaatgaaactaatttaacaaataaaccaaagagacttgcagcaaagcaagcattagcagctttaggtcaaggtaaattaatttcattatgggataatttatttaaatattataatcaacaaactgcacaaattttattaactagaaatgatatagttgattttagtcaatttaaaaatgcagagaatacaattcaagaattattaaatatgaatataattccaattgttaatgaaaatgatacaatttcaactcaagaaattaaatttggtgataatgatactttaagtgcaataactgcaggtatgtgtaatgcagattatcttttcttacttactgatgttaattgtttatatactgataatccaagaattaatccattaagtgaaaaaattttattagttaatgatttaactaaattaaatgtaatactaaatcaggtgcaggttcaagtattggtacaggtggtatggaaactaaattaattgcagctgatttagcaactaattcaggtattacaacaattatttgtaattcaaattatcctgaaaatattaataaaattgttaattataaaccaatttatgataattctaaatcattaagtgaaaataataaaattgaagaacaaaatttattaagtgaagaaattccattacatacaagatttttaggtcaaccaattaatcatgttaaagatcgacaattttggttattacatggtttaaaacctaaaggtagtgtaattgttgattatggatgtttccaagcaattacaaggaaaaatagaggtggtttattacctgttggtataatggcaattgaaggtaattttaatcaattagaatgtattgaattaaaattaggtaaaaagaataaagatggtagtattgatgcaattacatttggtcgtggtagatgtaattataattctaatgaaattgataaaattaaaggattacaatcaaatttaattgaaaatgttttagaatattgtgatagtgaatatgttattcatcgtgaaaatatggcattcccaactcattgggatgataatttaattaattttataaaagaaataggtaattaactaaagttaacattttttatagacattttttagaaaattctcttgtatatttagttgcctgtgataatgtaattgattttgattcaagtaataatttaattattgaaattgaatcattatatgcgattttattacattcattaattaattccggatttgaaatatttggtaatgatgtatcaatatctattggtttcggtattgatggtggtgatggtatattgggtaattcacatttattaaattgtttctttttaataattagcattgattttaatgtatcatttaatgatacctgtacatcatttatcaatggattaagcggtaatggtggtggagaggttttcgtttctgatattacttccttctccttcttcggcacttcaggtattggtggaggtaaagtacttaaaattaattgtattaatctattattttgaggatttgaataatcagtttcactatatgaccaattaggtaatataccattaattaaaggtggattaaatggataatttagtgggaatgtaagagttaagttaagtgaattgataaggatagttaatggattatcagatatcgtttcatattgtactaattgatttaaaagtgctaaatcttcctctaatggagtcattatcaaagaaagtgtgttggttaaagggtgatattatcatcagaacatgaaaaaaaagttggttgcataatataaatttattgtgcttattctttatctttatctttttatctctttcttttatgttgtttctttttacaaacaaagatacaatgtcaggatatacggtattaggtgttatgattgtaactattataattggttcaatattttggaaatttgcaccaaagcaagatcaaacagtttggagaagtacagtttcactttcattagcaatgatgtttttaatgtgggcatttacatatctttgtcaattacatccattagttgcaccacgtcgaagtgatatgcgtcctgaatagggtatttacactatataataattgtatatgtaagacagtattaaataataacttagtaaatattaaataataatgagatcttacataatgatcataattactgcactaatcgaagtatcaagtcgataaaacactaattacgcttaatatactccactaacaagactttattctctataaggcagagataaaggcagaaacgggagcaccataagaagaatgtaataagtatatataatactatatagtgggaaatacattctttttatactactcgagggctcattatattaatttttaagggtttctcttatactttattattacaatctctttcattatggtggttatatcttttattaatgtcactgttattaccaccgtatgtaccattactgcctcaattatcaattaatatttcatgggatttcttagattcaattgttataatttatcacggtataattattgctttatgtattggtggtattgttggtagtgttaatatattgatctattgtactatcaaagggatcattaatatgattgttagtttgttcagtacaccataccaataccactactatcactaaacctactatacatattacaccacctacaccatctactactactacacatacaataccagcagtagatgatactttaatagaaatagaggaagacggcacagacgcgacgacggtgacgaagtactgaaaaaaaaatttttttgctttttcatgctttgagaaaaggaaaattttttatttttcattggtggtagtaagtattatagatagacttcctttaacaacgattcaaacaatatgcaaattgcaccatctaatgaatctccaactaatgatgctaaagattggccattattattgaagaattatgatgatttacttattagatcatctcattatactccaattccttcaggttgtacacctttaaaaagatcaattgatcaatatattaaatcaggtattattaatttagataaaccttcaaatccttcatctcatgaagttgtcgcttggattaaaagaattttaagagttgaaaaaactggtcattcaggtactttagatccaaaagttacaggttgtcttattgtttgtattgatagagcaactagattagttaaatctcaacaaggtgcaggtaaagaatatgtttgtattgttagattacatagtgcattagatgatgaaaaggatatgttaagaagtttagaaaatttaacaggtgcattatttcaaagacctccattaatttcagctgttaaaagacaattaagagttagaacaatttatgattcaaaattatttgaatttgataataaaagaggtttaggtgtattttgggcaagttgtgaagcaggtacttatatgagaactttatgtgttcatttaggtatgttattatcagttggtggtcatatgcaagaattaagaagagttagatcaggttgtttaagtgaaaatgataatttagttacattacatgatgttttagatgctcaatatgtttatgataattcaagggatgaatcatatttaagaaaaattattatgccattagaaactttattagttggttataaaagaattgttgttaaagatagtgcaattaatgcaatttgttatggtgcaaagatgatgattccaggtttattaagatatgagaaaggtattgaattatatgatgaagttgtacttatgtcaacaaagggtgaagcaattgcaattggtattgcacaaatgtcatcagttgatttatcatcatgtgatcatggaattgttgcaactgttaaaagatgtattatggaaagagatacatatccaagaagatgggggttaggaccaattgcattaaagaagaaacaattaaaaaatgatggtaaattagataaatttggtagaattaatgaaaatacacctgaaaattggaaaaaagattatatttcacatgaagatatacctgcaccaaaagttcctgaagataaattaaaggcacctgaagttcaaaagagtaaaagttcattatttgataaaaaggatgataaaaggatgatgaagtaaaggaagataagaaagataccgaagaaaagaaggaaaagaaggataaaaaggaaaagaaagataagaaagataagaaagagaagaaggataagaagagaaagtctgaagaggaagatggtgaaaagaagaagaagaagaagaagtctaagtctgaataagtaatataagtttaattaaattaaataaaataacttttgtattttctcctaaataagtaacataacaaataaataatataatatttcatgcgccatttcattattattaatattattaatattattaatactgcgccacatggtaatattttagatgttaaattattaatgtactttccctaagccctttcacttcatttcatttctttcttttaatcaccacacaaacagtatgtcctgggatggatttaagaaagcattgaatagaactactggtgccgtattagttaaggcagcagataaagttactgataaagaatatgatattgaagagagaagatatagagttttagagaaagcaggagaagcattacaaaaagagactaaaggatatcttgattcattaagagcagttacagcatcacaagttgcaatgggtgaaacaattaataatttatatgaagatgcaagaaatttaggtggtgttaatattggtggaatgtatttacaagcagttacagaatatgatactgaaactgttaaacaattagatggaccatttagggaaacaattttagatccaattactaaatttagttcatattttaaggaaattaatgaagcaattaagaaaagatcacataaaaagcaagattatgaacaatgtaaatctaaagtacgtagattaattgataaacccgctaaagatgcaagtaaattaccaagagctgaaagagaattagcaatggcaaaggatatttatgatgatttaaataatcaactaaagagtgaaataccaatgttaattgatttaagagtaccatattttgatccatcatttgaatcattagttaaaattcaattaagattttgtactgaaggatatgctagacttgcacaagttcaacaatatcttgacccatcaacgagagatgaatacgcaaatggacagttagatgttagaattgaccagatgttagaagagatgagacaactcaacatctgttccctaggtattaaataggtattaaatagcaatatgattatgtaatataatagtaatataatagtaaaatattcgagaaggttcctgaagaaaaatggtgctcttcctcagttatccggtagctatttatttatttatatttgaatgtttccatggtacactactttctcttctttgattcttattgtagacaatagacaataacaatggttagagaaactaaattgtatgatttattaggtgttcaacctactgctaatgatgcagaaattaagaaagcttataggaaaatggcattaaaatatcatcctgataaaccaactggtgatacagaaaaatttaaagaagttagtgaagcttttgaaattttaagtgataaagataaaagagaagtttatgatcaatatggtttagaagctgcaagaggtaatgctccagctggtggtatgggtggtggtggattcccaggtggtggtgcaggtggattttcaagtggtggattcccaggtggtggatttagcttttcttcatccggtggtggtggtggtcatccattctctcaagatgatgcttataatattttcaataaatttggtggatttgattttggtggtagtggaatgggtggtatgggtggtatgggtggtatgccaggtatgggaggtatgggtggaatgggtggaatgggtggtggacaatcatcatcaagaagaagagaacctgaaacaattgatcttaatgtgccctgctctctggaagaattatataaaggtggagttaaaaaattgaaaattaatagaaaaggaccaaatggtgataatgaaagtaaaataatagaaattaatattaaaccaggttggaaatcaggtacaaagataacttttaataatgaaggtgattataaagatggtgtacgtcaacatttaagattaattttaaatgaaaaagttaataatatttttaaaagagaggataatgatttaagatctaaaattgatttatcatttaaagaatcattattaggtttccatagagaatttacaactttatcaggtcgtaaattacatttatcaagaagtaatccaactcaaccaggattttgtgaaaaattcccaggtcaaggtatgccaatttctaaacaacctggtaaatttggtgatttaataattgaatataaagttgattatcctgttaccttaacacaagctcaaaaggatgcaattcaatctaatttctaatttgtatagtatatcctaaattatattattaaagttatataagtaaaagttgtgaacgatttcatccgctaacgtaatcatataatgataaatcgactttacactgtatattgttattcatgagtcctcctacactcctttcttttgacaatgtctgttatattagtatctgcaggttatgatcatacaatacgattttgggaagcacttacaggtgtttgttcaagaactattcaacatagtgaatcacaagtaaatagattagcaattacatcagataaaaaatatttagctgcagctggtaatccaaaaattaatttatatgatataaggtcaacaaatccaagtgcagttcatacatttgaaggtcataaaggtaatgttacatcattagcatttcaattagataatcgatggatgtgttcatcaagtgaggatggatcaattaaagtttgggatattagaagtccatcaattcaaagaaattataaacataattcaccagttaatgaagttgtaatccatcctaatcaaggtgaattaatttcatgtgatcaaaatggtactgttaaagtatgggatttaggtgaaaataaatgtacttatgaattaataccagaggaagatatttcaattcaatcattatcatgtgcaagtgatggttcaatgataattgcaggtaataataaaggtaattgttatgtttgggaaatggaaaattcaactgatagaacattattaaaaccaatgaataaatttaaagctcatagtaaatatattacaaaaattttattatcaagtgattgtaaacatgttgcaacatgttcagctgatcatacaactagaatttggtcaacaaatgatttctcattggagacaacattaagaggtcatcaacgttgggtttgggattgtgcattttctgctgatagtgcatatcttgtaactgcatgttctgatcattatgtacgtttatgggatttatcaactaatgaaactgttagacagtataatggtcataataaaggtgtcgtttgtgtagctctgaatgatgtataagatgtatataagatagattcggtatagtttcctaattgggtaatttaatttattttgcatgaaaagtttgtcttttagtaggatatctctcttcttttggcaatgaatagatttagacattgcaggaattatcataagagtatatccaaactgctaagtgataaagaaaatctagaatttcaatcaactaaatcattactacctaatataaaaccagtttctaaagttgatgcattatggtatatacgacataaaggttatcctgaaattaaaggtaaatttaatcaaaattatttagataatgtactttcatcagctattaatgatgaaaaatgtttgtataaattgaaaagaataacttctaaattatctaatccaccaactcataaattacgtcgtataacaggtacatctaattggctttatgttattaaaactccatggaatagagatttacgtacagaaaattttaaaatgttaggtgatttaaggaaaagatatgatgaaataatggtacaattacaacaatgtaatagtgaaaatgataaaaatagatacgatactaatgatgatgattcaaaatggttagttgaaactgcacaaaatcaattaaagaatgaaaagaataaaattgaacaacaagtaatacaattttgtaaaagacaaggtgttatatatgacaaaattaaacctgaatttgataaattacatattcaagcaaaggataatatatctttattacataaagaattatctaatgaaactacaagtcctggaacttatactgatgtaattgatggtggaattaaaggtttattaactaaatatggatttagaagttaattatgtttattattccaaaactcttatatcattttcaatactaccttcactaaaccattgtttatctaattctattcgcataaatagtgcatcttcacttaattgtcttctataaaattctgattttaaataatgatctttacaacaatatctagttgaataataactctttaatgcaaatttttcagctattttattaactttaacttcatcccttatcttgtcattttgtatattacaaattggatatccacaccaatgtccaactatcctttcctctattatattttcatatgcacttttggataaatatcttgataataatttaagtaattcaacagtacaagttatctttcattaataattcaattattgaatatgttaatccatttgcttctttcggagtaagtaactggtttctcaaatccttgtattagtttcttaaagtcttctattcctattatcatgttgtgtatgtgtgtagtgtacagatataaaaaaagagaaagaagaaaaccgatataaagtttaaaaaagtttaatgttagtgatctacacgatatatcttatttcttttacaagcatatcgtatacttatttgcatccatgggacataagaaaaaactgcatatagatgtatcattgaacattacaacaactaaacgtacaagtctttggaaactgttacttcatgaattcaatatttccaataatacaaatcaaaaatcaaatgattcaataaataatgataataatattcaattattgtttaattatgttaaattaccaatacatttaggagaaatttatgatatttggattgatttatacattagttgtatttcttaaactgttagttattataccatttcgatggattattcatacattaatattaattatttcaacatttacaaataaaagtaaaaggattaaattaccaaaatttaattcaataagttataaaaatgattcaattgcagtatctaatattataattacattattattattgaagaatattgatacaagtagaatttatcataatattagatcaggtactgcaattaaattatattttatgacacaagtattagaaattgctgatagattattaagtgcaagtggaattgatattttaaaatcattatttagaattaatataaggaaaagaaaaattaatttcatattcatttatggattatcaatagtttatctctatattcattcatatgttttagtttatcaagtaatggcattaaatgttgcaattaattcatattctaatgcattattaacattaattttatcaaatcaattctctgaattgaaaagtgcagttttcaagagaactgaaagagaaggattatttcaaatttcatcatcagatttaaatgaaagatttttattacttataatgttaataattatttcatcaagaaatttattacaaattttaattaatacatcatcaattaatgattttttcaataatattaaaccaaattcttggttaactaatataactccttggataatggttgataattggcttggattattaattggtccttcaattttggttattggatcagaattattagttgattggattaaacattcttatattataagatttaatagaattaaaccttcaatttatgataaatatacgaaaattttatcaaatgattttattaatggattaaatggtagttcaaatcaaattaatgattatccaagtttattgactaaacgtacaggattcccaattacaacattattaatagttttctgtaaattatcagttttcccatatattaaacattttacaacaaatttattaaataattattcaacaattatatcatctattctcatattattattaattattgtattgattacattattaatatttattagattattattatcaattatattacttaattggtctaaagaaatattatcaaaaccaattttgaaaaatgattatacacttggtgaaccaaatgttaatacgagtaatatttcagatgttaggaaatctttatataatagtgaaattgaaacaattccacctaccgtagaggaaaagagattgaagaagttatcagatagaaaagttgatgctgatgattcattgtctaatgttgtaaggtttgaaatggcagacaagagaatatggtgattatgtaagtactttctattctttatatttataccttttatactctatactttactccttaacaacataaataccatcattaaagataagtacaatgtctaaagtaacagcggaatcattccaaacaaaggactctgtatttatgtcagggaatttctctgcaaaacatattaaaccaacaattaatgagacaattccagaaactaaagcaacaggtgatccaacttcaacaaaaccatcaactgttacaattacaggtggatttaaaactataaatactcaagataataatgaatttaataatcaattaggtgtaagtattaatagaactccacatcgtgaaagtttacttagtgcatcaattacatcaaaaggaactgaatttagtattaagaaatcaatttcaaatactgaacaatcaattcatcgtgcaagatcaatgaatttacctaatgatatagttacagaggaacgtagagaatttacaccaatagagaatgatatgcctaatgtaattgatacagatgaatcaataatgtttcgtcaaccacaaccacataatagatttttaaagaataaatcatttaatagaaatattaaaacatttacaggaatgtattggaaatttgccggtgaagatcttgaagatggagaggaagaagaggaagatgatgaagatgaaagtgaaatggaagatgaagagaatattagttcatcatctggtaagaaaacaactacgttaaaggcatttttacttttattaaaggcattcttaggtactggtattatattcctacctaaggcattctctaatggtggattattgttttctaatttaatgattatttcattttcattaatttcatatttttgttttattatattaattaagacaacatctaaatgtaatgtttcaggatatggtgatgttggatttaaattatatggtggaatatttcaatttattatattattatcattagcattatcacaattaggatttgcatcaacatatattgtatttgttagtaaaaattttaaacaaataatagatagattattaggtgatgaatattcaattggttgttttattataattcaatttttaatatttgtaccaatttcatttacaaggaatatatcaaaattaggtgcatgtgcattaattgcagatatatttatttttttgggattaatttatatttatttccaatcatcacataaattaatagttgatggaattgcagataatttaattatgtttaattcaaataattggacattatttattggtacagcagttttcacatatgaaggtattggattattaataccaattcaagaaagtatgaaatatcctgaaaattttaataaattattatttattgtaatgataattgttacagttgttttcacatcaattgcaagtatatcatatttaagttttggtaataatgttcatacaattatattaatgaatttcccaatgaatgaaatgacaattataattcaaattttatattcaatggcaattttattatcaacaccaattcaaattttcccaacaattaaaattattgaaagttatcttttcaataaggaaaggaaaacatggaaagataaaattagaagaaattcagaggcaatttctatattaagtaataatacatcaagtgcattatcaacatatagtagtataatgggtagtccaaatatgaatttagttaataatgaaggattagtttcaggtaaatcagataattcaataaagttaatgaaaaatattttaagaataatagttatttcaataatgtcattaatttcatatttaggatcagaaaatttagataaatttgtttcattaattggttcattaacttgtgtaccattaatttacatttatccaccattattatattacaaacaatttcaaagtgaaatgagaacaatagagaaatgttttacattaatagttttaatttcaggatgtgttgttatgtcatatactagttatcaaactatttctacatggtagttagatactataccctatattttctgtatataaccttactttgtcataatgataataataataataataataataataataataataagactttaagtgaaaaattaaaaaaaaattttcttttctacgatcttctttacccgattaggaaggtcaatgacagattatatttaattagagagtgaagaatttgcaattttaatgggttgttatacactcttttctcttagattatgggtcaagtacgtgctgttacacctcctaatgttctgttaacagagaaaaatgttgcagaacgtcctaaaacttcaacaatgtttaaaattaatagatttttcagttcaagcaatagcagttcgataaattgtaataataataataatagtggtaacaataatgtgattatgaaaaactccggtggtgaatcaagatcttttagtgggaatagtatgactaagaagagtgttcatagtggtggtagtagtagtagtaatgatggtgatcatgaaaaggaaggatggaaggataaagagaaggaaaagaaattacataatggagatatttcacgtggatcatcaatacgaacaaagaatagtagtattaataataataataataataataatacgtatgcaagatttaaaattttaccagatggtaaacatacacataatttacgtacagttaaaagacaagaaaaattaggtaagatggttaaagattggattagaggagcaaatcataatcgacattcagatgcagttagtgcaatacctaatatatttgccaatgatttaaatgatggtaataataataaaagtaaattaccaccaagtttattttcaacatatttaaatgaacaacagataggaggagaaggaggtgatttaagttcattattatcaacacagccgaaatttaaggataatgaacgtaatgaatcatttattgaaaaatatggtaaatgtaatgaaattattggtaagggtacatttggaattgttagaattgcacataagaaagtaaataatacggatgtaatgtatgcagttaaagaatttactaaaagggataatgaaccagagagtaaatatagtaaaagattaacatatgaattttgcatatcatcatcgttaaaacattgtaatataattaatgcatttgatttatttaaagatttaaagggagaatattgtgaagtaatggaatattgttcaggtggtgatctttattcattaattgtatcagctggtaaattagaatatattgaagcagattgttttttcaaacaaattatgagagcagttcattatatgcataatatgggagttgcacatagagatttaaaacctgagaatatattacttacaaatgatggtacaattaagataacagacttttggtagtgcagaatgttttaaaactgcatgggataatgaaattgaattaagtaataaaattaaaggatcatcagcatatattgcacctgaacaatttattaataatgaatttgatccaagatttgttgatgtttggtcatgtggagtaatttatatggcaatgcgtacaggtagacaattatggaaggaagctcgtaaagaagatgaattttttttacaatatttaagacgtaggaaatgtgagaaagggtatgaaccaattgaacaattaaagagagctagatgtaggaatgtgatatattcaatacttgatccagtacctgagagacgtataactacattgcaggtactgaacagtgaatgggttagagagatttactgttgtaagagtgtataatattattaaagtaagcgtattgtaatacgaaaatattaccccctacgggggaaataatttttcctaagtataatacgtggattacgtaagatttgtataattttattacgtaagcatacagtgtatattctattcaactctatttacaacttgtttgagaccatcagtaacattgataacatactactagattcattagaaagagaaaagttcaaattaaaacttcccgcaagccgattttttgatttcgatctagttattaaataaatgtaaaaagaatttttacttcccatagtaaatttactgaaaaattgttcaaaaaaacacgaaacatggtcaaaattagtaatgttaataaataatgttaaacaacacttttaaaacatatcgagtatcttttctatatatagagacttccctctttccaatgatactatttaaaagtactcaagtattgtagatctcccacggaaattgattaaaattttgtatggtgtaaactttgaacgttcataactcaatcaattttcaatatttttacaaacttacaacacagatgtttgattcagacaattctctatctacatgtctaacatgagtctatgtggaggtctaacaaataagaaaaaaatttagaaaatcacgttttcgagcgttacgacgtattatacttaggatattacgtaatgtatagtgaaggacgatgcgacgatttcaattttcaatttttgttgatgatttgcattcaaatcccgatttgtcagattgaacattctttctgctgagcatctgatgatggtcttcctgatttaatggtctctgatagtatagatgggtcattacgaataggtattgataatcgaaatacttcaattaataggaaattgtttaaaatgaatactctttcaaattatcttttgaataaattacttttaaggcccatttattcaattttattaccttgtatattacttttattcataagttatccttcattatacaatttctacttatctcctcattcattcattaattcattgaattttaatagttctaataatttaaaatctataagatttactaaattaaataatgatttaagtcttaatttaagtcatttatcaattcaatccttttctatatattcagatgataatttattaacaaaagattctctaatacagtttcatgatattcaacagatgttatttgaaaatttattcccttaatgatatgaaaatttattccccgttagattattggaataatgataaaaatttaattcttaatgatgataatattttgaaaacaattcaattaaatggttggaatttgaaaaattctattataaatcctttaagtaatgtgaaattattttcaggtgttgaaaaattagatggtttaattaaaagtgcaaatattttaagaattataactttatttaatgattaataatgataataatattattaatatactgaatgaaaatgtattgaaaattaataactccttcaataattcattcaaaattcaatcatcatcatcatcattcatcatcatttgattattacaaaattgatactgaaatcttataacattatagaattcatattaatttccattatactacccatattattcattcaattaattattaagatcaaaaaattaaaactgattaaatcaaaattatgtattttctcaggttttatccttcaattatctttaacattctttgcaagtttatcattaacttcaatttgggatcttaatttagaattcttacaaataccctttttattgataatttcaggtcctttattaattagtatagaaaatatttcaagattaataattacaactcaatcttattcaaatgaaatctcatttactaaaagagttcaaaaagttgttaataactcattcccaatatcttcaagttataatgcttttagtatattaatattattaatctctttatatatgtcaagaacaaattcatcattttatttttgtttatttacaatcttcaatataatcttaaattattgtttaacttatacttactttctttacaattttagttgtggatctaaataaagttgaattacaagatttaatacaaatttcagataagaaaaatttttcattaccagaaaataatgattataatcaaattgatgaatttaaaattatcattaataaagagaaatcaattttaaaatatttatcattaagtaatattttacttaacttaattttattcctgataattattacaatatcacttaaatgggcatgatggaattttatgttcaaatccaaatattaatttggatttattcttgaataaacgtgggtttgttcatgaattattacaattatcatcaatcaaagaaaattctttaacttattaaattatttgatccattcattttcagtcaaggtaattcaattattcaatgaaaatatcctctatgaaaatacaatcaaatattcatttgatttatattatattttagaaagtttgtttttcatattatttacaagttcaattttaatgttaattttagttttaaaaattaataaatcatcaaatatttcaaaaaattcatcaattaataattcaacaacttctaataaatcatctacaaaatccattaataccaacatttgaatcaaaggaattagttaatggtcatgtattagatatcgttaaacttatcaacatcatgcatgtccatttatcgtatccgttggtattgatcataaaattttagtttggtcaccaatgaaaaatccgattccgaaaccaactcaattaccaattaatgaaaatttcttaccaattacaaatgttgtaatgtcagattctggttcatttattgcagtttatagtaaatttggtgaaattaaatgttggtcaagattatcaatgtcatgggtttgggatgttcaaattgatgaattaaataatgatataccattagaatcttttttcagaaggagaactcatgttagtaatggtagaagaaaattagttagtagatcatcctaaattatctaaaactgttaaagaagaaagtaaaagtgaagatactaatactgttattaaaccaaaattaaaatcaagattaaaaccagttgatgaaaataatttaagaccaagtagatcattatcattagattctaattttatggatagtgttaatttaaagaaattaacatataatagtgatatggaatttataattgttttaaaaaatggtacaattatttcaattgattgtacaaatggtgaaatgaataaaacaattttaagtaatagtacattaatttgtgccaaaaaattattatcaccaagagttaatgatagaattgtttgtattaaagaatctggtggattagttgtttcaactgctgttaataataaatggaagagtagaccatgttaaaattgatgttaataattataatatgggtaaaagtttaattacaccagcagatttatctaaatataattattcaacaccgtcatcaccaacaatttcaccaactaatgcatcaattgcaattaatagtttagatttaaataacagcagcataaatgtgactaaaaaagttgattttgatgaagattcaatgtctgatttcaaaggattagttatggaaactgtaccatttgttggtatgattgttagagcatttggaattaaatgtcaattaattgatgttcaaacaggaattgttttaaaagaatgggaaattgttaaatttaagaataatagttttaaagtatttcatcctgaaccatcacattgtagattttgtggttgtgcatcagtttcatcatttagtgttgcatatacagaatttgatacaaattatttaattttacatacattttcaattgataatagagctaaaaataatatttgtttaagagttgaaagagattcaagagagacaagatgtcttggatttgcaagtgttacagaacatagacatttattaagtgatgttgaaaattggtgttcaaatgatttaaatattttaatgggtattagaaggaaacaaaataatgatgatgaatcaattataacaagtgatgaaattattaataatgataaaaatgataaaaatgaaattaataaaggtacaaatactgcattaaatagaatatttgaatctaatcaaattggtttaagaaaaagacataataaaataaatcaattaaatgaactttctaataatattttatcaaagattgatattaataataaaattaacaatactacagaggattttgtaattactgatgaaaaattattaaataatgataatgataagatgaataaagtacataaaataagtgatgtttggggaggttggacaatgtcagcagatggtaaagttaaattttttgaaatacctgatggaacagattctggtttattaattaagaaaattggacctgtttgtaaatttggacataaatcaatgattgttagttttggtaatataatgaaagttttatatttaggtaatgataatttaattgaggaaggtgataatgaagaaaatgaaactaatagaactcgttcatcttcaaatgcatcaatatcatcattaaaaaataaaccatcatcctcaatatcatcatcctcatcatcatcatctaataagttattaaataattcatcagtttatcaatcatcaaatagtttaagttttattgatcatagaaggaaattaaggatgaaaaactatgatcttacacattctactaatttcagtgatcttaaagttatagaagatgatgagtaatttgtatagtttacaacagtttacagtttataataaaacacaacacaatacaatacaataaagtaaatattaatgattcataacgtacaaatatataagataagagtcatatcgtaataatagcgcttaattaaaaatgttagtggaaatttaaaaagaggttgttttccatgataatttgaagttatattctttatctgaaggattactactctaggacaacaatgacatttgatataactaagattgcaagaccaaatattttaactcttgaaccatatagatgtgcaagagatgattttactgaaggtattttattagatgccaatgagaatactcatggaccatcatttataggtatgacagagagtgaaaataaattagaattaaatagatatcctgatccacatcaacaagtattaaagaaacaaatttgtgaatttagaaataatgaaagaattggtgaagataaaattgatattaataatttatgtttaggtgttggatcagatgaaagtattgatgcattaatgagatgttttatttcacctggtaaggaaaaaatgttaatttgtccaccaacttatggtatgtattcaatttgtggtgttgttaatgatgttgaaattgttaaagtaccattagatttagaaacttttgatataattccagaaaatattttaaataaattaattaatgatccattaattaaattagtttatattacatcaccaggtaacccaactgcaaagaaaattagtgaaagtaaagttttcaaattattagaagaaattgaaaaaaattcacttaatgttataattgtactcgatgaagcatatattgatttttcaccaattggttcatcattatgtacattagttaataaatatccaaatttagttgttttacaaacattaagtaaagcatttgcattagctggtattagattaggtattacatattctaattatcaaatttctaaattattaaattcaatgaaatatccatataatattagtaatttaacaagtgatattgcaattagatcaacaactgctgaaagtttaaaagagacaaagaataaaattaataaaattattgaacaaagaggtattgttttagataaattacttaaattaaaatatgttggcaagaataaaggtggattagatgcaaattttatacttattgaaattttaaataaagatttaaaacctgataatgaaattgcaaataaattatatttaacattagcaaaggaaaataaaattgttgttagatttagaggtaatgaacttggatgtaatggttgtcttagaatttcaattggtacttctgaagagaatgaagttttagtttcaacatttgaacaagttttaaatgatattaataattaattagaattatgatttgtaatcatttattttcatttctaatttgtaatcaatcatatactttatattaataatctagatagtaaatatgattataattcatatttatttttatttctaatttgtaatttttaacttcttgttaccaatttgtataaatactaaggggaaccatcatcatatatttgttgttgtaagtaatatttatgagcatcaacaaacaaacaaattataatgagagcagtaatttttggatcaacaggtaatgtttcaaaaccacttgcaactaagttagctaaagatggtgttgaaacagttgttattacacgttcttcaaataaagcagatgaaattaaggcatttggtgcaattccagctattggtgatattgatgatgtggaatttttattaaagacttttgaaggagcaaattgtatatttgttaattctccattaccttacacacaaccaaatattgttgaggtaattaataaacaaatggaatatattactgatattattttacaatccaaggttcctaatgttgtttatttaagttcaattggtgcacatagaccaggtattggtggattagaatttcattattataatgaacaaattttgaaaaataaattaaatgggagttttaaatagtttaacttttgttagacctgcaaaattttattcaaatcttattagttaatcttaacgatgccaaaaagggtactgtttattcatttttagatattgagaaagttcattcatatgtttcgttagatgatattgctgatattattagtgaaattattgaacatccaccaactaataaattaaaagttattaatattgaaagtgaaagaatcacaattcctcaaattcgtgatttatttgctaaagtatttaatcaacctgaacttaaatgggaatatgttccagttgaaaatactgttaatgcaatggttcaattgggattaaagagagattcagttgatgctatttttgaatcattagcaccaccattacatgatgaatttcatgaagacttcttccatggtaaaactgaaattgttaagggtaatcgtacagttgaagattatattaagaatgagttaaagccaatctacgatgctatctgatataaaagatacacggtaaattcggctatcattaaggagaccgctttccgactatgtatattcctaggattaagcgtataatttatatagataatatactccggcaaacggagttataaaaataatcactacaaacggtaagagacgtattaaaacaattgaagttcaattatataacaatcgtgttaataaagattttaggttatttagcgtaaactttattacaaactcgttgaatcgttttgctacctggttatctatacaaattttgacaatttaacaatatagggcttttccgacatcgattgcaacgtagtagtgtagtattatgccattagtaaattgtaattggtatttaaacactataattatatacccaaaaacactaagcaatcaagataaagataattctaaaaacaatagaaaacgataaaaagtctaaatacattgaaaaaatggtctcactgtgaggctggttattcattaattatttcaaattattgctacctttgctattatttccatcaatacaggctctgtagtaaagatactcttgtacatactttgaattatctgaactgactcaatgacatataagagaacttattgaatactctatatcagttaaatcagtgcaataatataaggaatgaagtaggtggtggaagtaagtaattccgtaggttaaagagcaaaaataaatttaaagtgagtaattttttaattttttaattttttaattttttaattttttaattttggaaaaacggttttttgacatgtcttagcaatcatgttttccgattgtttacatcgattttaattcatattttattgtctacaagtgtctttaattatacaattatcagtaccattaccatttccagtataatttccagtatgattagcatctctattgtaaataatcaagaatcatgagatgaatttatcatttactattattcccgttgattttcaactcagctttattttgaggagattatatataaatatatcaatggttaattccaatttaaattatcaatgtattaccttatttaggaatatctattccactctatttataaaagtttaatgcaaattatttcgttataaactaagcaaaaacttactcaatgaaatacaatatattggtatcattagtatactttttactttattcaaatcttactcttgcttatgttataccatcttgtactgatacagttacagttgttgcttatcattctgttgagttaccacttggtacaaatgcaggactatcaagtaggagaactagatctgcaagaccatcatcaagttcaagtttaacatcaagtacaagtttaatttcaagttcaagttcaagttcaagttctgaaataattccacaaacttcatcaagttcattatcagacttaacatcaagtatttcatctactgaattattatcatcatcgtctactgaattatcatcatcagaaattttttcaattactataccatcatcattcattacattgtcaagtgaatcttttaacaattctttaactacaagttcaagctctgaaataatttctgaaagttcaacttcaagttcaagttttgaaataattccagaaacttcatcaagttcaagttttgaaataattccagaaacttcatcaagttcaagttctttagatttatcatcaattacttcatccactttatcaatcactataccattatcatcaagtgaagtatccagtgaatcctcaagtgaagtatcaagtgaatcttttaacaatttttcaacttcaagttcaagctctgaaataatttcagaaacttcatcaagttcaagttcaatttcttctttagatgtatcatcaagtattttatccactttatcaatcactataccattattatcaagtgaagtatccagtgaaccttcaagtgaatcttcaagtgaatcttctaaatcctatgcaaccactacattttcaagctcttctatgatatccttacaattttcttcatctaatgatgcatattcatcagcatctataaatacatctttatcatccagcgacgtatattcttccttatctagcaacacatattcatcatcatccatgatttcacattctatgtctaaacgagaattatcatcaagtatcgctgattcatcatctgttgcatcatcatccactcttacaccaagtatgaaaccaagtattaaaccatcatccacttttacaccaaacattaaatcaagtactaaaccaccatcaagctctacatcaagcatgaaaccaagtattaaaacatcatccactcttatatcaagtatcaaaccaagtattgaattgtcatctagtgcccctgaattatcatccgttgcaccatcatccactccagaatcatcatctgctgcaccattatctaaaccagaatcttcatctgttgcaccatcatccactcttaaactaagtactaaaccatcatccagtgtttctgagtcatcatctccttctaaaacaagtattagatcatcatccagtgtccctgaatcatcatctgttgcagcattatctacttttacatcaagcatgaaactaagtacgaaattgtcatccagtattcctgaattgtcatccacttttaaatcaagtatgaaaccatcatccactcttacaccaagcatggaaccaagcactaagccaacatcaagtgcttctcagtcatcatccccttccaaaacaagcatggaaccaagtattagatcatcatccagtgtccctgaatcatcatctgttgcgccattatctacttctacaccaagcataaaatcaagtagtaaaccatcatccacttttaaaccaagtactaaagcatcattcactgctgaatcatcatctgcaaagccaagtactaaactgtcatctagcgctccagaatcatcatccactactacatcaagtactaaaccatcatctgttgcatcgtcatccacgcctacactaagtatgaagtcaagtaccaagtcgtcattcagcgttcctgaattatcatccactagtacatcaagtgttaaaccatcatccactgctgcaccaaacatggagtcaagaactagaccatcatccagttcagaatcattatctgttacaccatcatccaattctacaccaagtatgaagtcaagtgttaaaccatcatccaattctacaccaagtatgaaaccaagtgttgaactgtcatccagtgtccctgaattatcatccgttgcgccatcatccactactgcaccaagtacgaaaccatcatatgttgcattatcatccacgcttacaccaagtatgaatccaagtactagatcatcacccacttcctatttattatctgcaaaaccaagtatcaaaacatcatctactccctattcatcatctgctgctccaccatttactcctaaaccaagcatgaaaccatcatcaagtccagaatcatcatttgctgcatcatcatccactcctaaaccaagtactaaactgtcatcaagtgtccctgaatcatcatctgttgcaccatcatccagtgtttctgaatcatcatctgttgcatcatcatctaaacaaagtataaaatcaagtactaagctatcatcaagtccagaagtatcatctgttgcatcattccccactcctcattcaagtatgaaaccaggtgttaaaccatcatctagtgtttctgaagcattatctgttgcaccaagtatgataccaagtgttacactgtcatccactcatacatcaagtacaaagtcaagcaccaaattgtctttcagtatccctggattgtcacccactcctaaatcaagtgtgaaaccatcatccacttcttacaccaagcatggaaccaagtaccaaaccattatccagtgcttcagaatcatcatccagtcttacatcaagcatgaagtcgagtactaaaccatcatttacttcagaatcattatcttttgctttatcatccagtacagaatcatcatttacttttgcatcaagtatgaaaccaagtaccaaaccgtcattcagtattcatgtaatcatcactcatttcaacaccaagcatgaagtcaagtactaaaccatcatctactccacaatcatcatctgttgcaccattggatatttctaaaacaagcactaaaccatcatctagtgctccggaattatcatctgcaaaaccaagtaccaacccatcatccagttctctaaaatcatcgtttgcaaaaccaagtactaaaacatcatcaagctcttattcatcatactctgcaccatcgtctacttttaaatcaagtatgaaaccatcattcagtccagaatcgtcatcatcaactgctactccaagcatgaagtcaagtgttaaatcatcattcagcgctccagaatcatcatatgtttcatccaaatcaagcatggaatcaagtaccagatcatcatctagtgcttctgaatcatcattcacacccacatcaagtatgaaattaagtaccaaaccgtcatccagtgttcttgaatcattatctgctgcaccatcatccacttctaaattaagtactaaatcatcatctatttcagattcatcatatactcctaagccaagtactagaccatcatccacacttacgccaagtataaattcaagtacaaaatcatcatctattatttctggatcatcattttttgcaccatcatccactcttacaactagcatgaaaccaagtactagactatcatccactccagattcatcgctcgcttctgaatcaagtactaaacaatcacgtactttatactcatcatccatgataccaagtgttaaaccatcatccagcgcctatgaaccatcatttgttgcaccatcatccaaaacaagtataagcaatggaccatcatccactcaagaatcatcatctattgcagcattatcaacttttaaatcaagtaccaaaccatcatccaatcctacaccaagtatgaagtcaagtactgaactatcatcaagtgctccaaaatcatcatctgtggcaccatcatccaaacaaagtatgaaatcaagtactagaccatcatccactcttacactaagtactaaaccaagcactcaaccatcatctagtatcactgaatcatcatttacttatacatcaagtatgaagtcgagtattaaaccatcatctagttctctagaatcatcatctgcaaaatcttcaaccagatcatcatctactctagaatcatcatctgcaaaaccaagtactaaatctttatccaggtcatcatccagtccagattcatcatctacttctacatcaagtgtgataccaagtactaaaccatcatccacatcggaatcatcattcaattctactccaagcatgaagtcaagtactaagccgtcatctagtgtttctgaatcatcatctgttggatcatcatctaaacaaagtatgaaaccaagtactataccatcatccgatccagaatcctcatccacgcttaaatcaagtataaaattatcatctagtgcttccagaactatcatctgcaaagccatcatccagaccatcgtccactctagaaacatcatccacttctaaaccaagcactaatatgtcatccagtgcttcttattcatcatctgctgcatcatcatccaaacccagtatgaaatccagtactagaatatcatctagtgtccctgaattatcatcaactttcacaccaagtatgaaaccaagtgctagaccttcatctagtgtttatgaatcatcattcattcctacatcaagtattcagttaagtactaaaccatcatccagtggctctgtatcatcatttgttgcaccatcatctattgctcctgaatcatcatcagaaaaaccatcattcccaccatcatccactctagaaacatcatccacttctaaaccaagtactaatatgtcatccaatgctccttattcatcatctgtttcaccatcatctactgctaaacaaagtactaaaccatcatcatccagtgttactgaatcattatctacatcaacaccaagtataaagtcaagtattataccatcattcactcttactagaggaactaagtcaagtgttaaatcatcattaaatgctccacaatcatcattcactcatacaccaagtaataaaccatcattcagtttagaatcatcaccagcctctagcgtggcaccaagtaccagaccatcatctaatgtccctgaattatcatccaatcctacattaagtatgaagtcaagtaccaaatcatcattcactcctaccacaaatatgaagccatcatctagtgttcctaaatcatcattcacttctacaccaattctggagtcaagtatgagaccatcattcagttcggaatcatcatctgtagcaccatcatccagtcatatatcaagtatgaaatcaagtactaaactttcatccagtacatattcatcatctactgcatcatcatcctctcttacatcaagcatgaagtcaagcactagaccatcatctactccacaatcattatctgttgcaccattagctacttctaaaacaagcaacatatcatcatccagtgctccagaattatcatctgcaaaaccaagtactgaaccatcatccagctcttattcatcatatgctgcaccatcgtctactcctaaatcaagtatgaaaccatcatcccgtccagaatcattatcatcaactgctactccaagcatgaagtcaagtgttaaatcatcattcagcgctccagaatcatcatatgttgtacagtcatccaagccaagcatggaatcaagtaccagatcatcatctagtgcttctgaatcatcattcacccctctatcaagtatgaaatcaagtactaaaccgtcatccagtgtacttcaatcaccacatgttgcaccatcatccattcttacgccaagtataaagtcaagtacaaaattatcatctattattcctggatcatcatcagttgcatcatcatccactcttacatcaaacatgaagtcaagtactagaccatcatttagtgctcctgaatcatcatttacacctacatcaagcatgaaatcaagtaccaaaccatcatccactccagatacatcatccactcttaaattcagtactaaaccatcatccagtgtttctaaatcatcatctgttggatcatcatctgaaccaagtatgaaatcaagtaatagaccatcattcagttcagaatcatcatctgttgcatcatcatctactcctactaaatcatcattgagttcagaatcatcaccagcctctacaccaagtatgacaccaagtagaccatcatctagtgttactgatttatcatccagtactaattcgagtatgaagtcaagtgccaaatcatcatctagtgctacaccaagtatgaagtcaagtgcaccatcatccaattctaaatcaagtattaaattatcatctagtgctccagaatcatcctctgcaaatttatcatccagtgttcctgaagcatcatttacacctacatcaattatgaaatcaagtaccaaatcatcatctactcctaaatccagcactaaaccatcattcagttcagaatcatcaccagcctctacgtcaagtatgaaatcaagtactaaaccatcatccactctagaatcatcaactagtgctacaccaggtattaaaccaagtggtaaacaatcatccagtactcctaaatcatccttcactcctacaccaagtatgaaatcaagtactagacaatcatccaggtttactcaatcatcatatgtgtcaaaaccaagtagaagaccaaatatgagatcagcttccagtttttcatattaatgaaatagatggtaaatttataaaagaaagaaccacatttacaatttacaacaagaaatataagatcaatagttatactattaccggttgaataatttttcattaactgactaacttcattcttttgttttattccatttcattaacaatcatttatacattcatataatcaataattataactatttactggaactaaatagttatataattgaaattatttgaattattatttcaaacatttcgttcgtttctatactcaatacaatacgacatttacactatctcccccaaaatataaatataaaataaccttagatatcccctctcttttctctctttatatcttccctttataattataataataggcttaattaattaaatgtaagattacgtaatattcataatgcatggtaatctgatatcatattaagttaacggtaacttcattttcaactaccggtaataattttaagttcccagttgaaattttgctttttaaaattgaatgcaacataatagtattggttctttataattattaataaatagttccagaaacaatagaattaatgattaaaaaaatttagatggaaaaaaaatggtctcataacggttattaaacggtttctcatccctttacagttatattattaaatgaacaaaatttataaaattggaaccttacataaatctaccagtaccagatcttctagcatatgaataatagttgtaatgaatatatcttaatgcgaagaagaagatgattaggtggttactatctactactccgcaatttagtattgtaatcataccactgaatatcatatatcgttgtaaaattgttctattgcttgaacttatatgcttctttttaaagtatactctattgtaactaattcagatattcttgtatactctaaattacttgatctaatttgaaatgagatacatattttagtctaatactcagtactaattataagtagtactttcttcgtaaatacaaatatatcagattcccttatcccatttcgtcaaaattctgtaaatacacgagtggtcaatataatgaaaatgaattaaatgaaataaatttatttcctaaaagagtaaagacattatttaaaataattattcttcaaatttcaccatcaattgttcaacatgtttaagtgtatatactactattattattatcatcatcatcattgtgattaatcgagggacataagatgagtctacaatatttcaatatccctttcaatttttaactcaacttctttttcaaaaaggttatataaatatggatggttagctccaatttgaattatcaatgtatttacttatttggaaaaatacatttaactccattttttaagtttaattatatttcttagattattaactaagcaaaaaattattcaatgaaatacaatatattgatatctttagtatttttttcaattttatcaagttttacttttgcatatttattaccaggttgtactgatacagttacagttgttgcttatcagtctattcaattaccacttggtgcaaatgcagggctatcaagcaggagaactagatctgcaagaccatcatcatcttcaagttcaagttcaacttcaacttcatctccaattttagtttcaacttctgaaataatttcagaaacttcatcatctgtcatatcattagaaatttcatcaagttcttctttagaattaccatcaagtattacatctactgtactttcatcaactgattcatcatcttcggaaatattttcaattactataccatcatcatccactgaatcgtcaagtgaatcttctacaatttcttcaacttcaagcccaagctctgaaagtttgagttcaagttcttctttagatttaccatcaagtactttatctactttatctactttatcatcattatcaagtgacgtatcaaatactacattttcaagttcttctgtgacacccctacattccttatcatctagtgtatattcatcatcatctagtattgtatattctccatcatcttctgtgattccatattcatcatcttcatctccatcattttcatcttcatcgtcttatgttattcaatattccacatcgtcatcatcctcatcatctttatcatcatatgcgatttcatatccttcatcatccaattcaattttatatccttcatcatcctatacgatctcatatccttcatcatcttatgtgatttcatatttttcatcatcatctatatcatcctcccggattcaacaatcatcaaatgtttcacctttttcaagaatttcacattcagtttctgaaccaaccactaatttatcatcattatcatcatcaagtatcccaaaatcatcacatgtttcacctttttcaatgatttcacatacagcatcggtcacttcaaaatcatcatcatttgctcttccttcctcaatgacttcacaaacaaacactgaaccaatttttgaatcaatatcaatcactcctatagctcttagctcttcggatagttcaacatcatcaacatcatcaacatcatcaacatcaactattccttcaagaagtactactactgtttattcatgtgattcatcatatgttgcaatctgtgatccagaaccaacaactattaaaggtggtaaaacattatatggttattcatgttcatttaatgatgataaaattaatggtaaatttaagaaagatagagccactactacaatttctgataaaaagtataaaatcaataattatactataccatcaattaaatgtacagctccagctacaacaactaaaaaataataactaaatgaataatttcagtgtactgaaattttacctttttttacttcatactcagatattcatataatcaatgattttaaactatttactggaactaaatagtttatttaatcaaaaattatttgacttgatttattttatttttcattcaattcgttttctttaatataatattcatatttacaatatctccccaaatatacacaaaataacctttcctaaatattccctctctctgctctttttatatctttcttttataatataataggcttaaataattaaatttaattataatattaaggtacaagattatcataatgtacttcacttgtgtaatgaaacaatcgatcgattcaatcatgtttagcaaaaaaaaaatataaactatataataactataaagtattgttcaatagaattatataaaaagaaaaaaaagcagaaaagtccttctaattgcaagtctcaaaagcaatgaattatttaaatgttttttcagttattaaataaagatattatcaaaggaaaatccgttaatcaaggaagatggggttttttcactgttaaacaagaagcagatggatctgaaaaattcaaagctagattagttgcaaaaggatttacccaagaatttggccaaaagtatttatttagaaacattctctccagttgttgctatatggaatcgtaaagattcatgttaagtttaagtttcataaatggctggcatattacacaaatggatgcaaagaatgctttcttaaatagcaaattaaagtatgatatctatttccaacctccagatggatgcaacattagtaaaaataaagtatggaaattaaacaaaatcaaaccctttcggaagtattattcaaatcaggattcaaatcttcattattagatccatgtattatttttttcatcaagaattaaaagtttatattacaatgtatgttgatgattaattatttttaggtaaattcaaacaaaaatattatgaaagttattatttgagggggagtattagtatttctttaagttcattgaatagcatagcacgtattgttaataatggtagatacgaagaaccaaaaattcgtgttaatatcatctacacccaatacatactattagttttggttagtgaaagaagaacaatcaagagtgtaatttaaaaaactggggatatgtcttgggtatttatagtaatttaatcatatatcttatcttatcttattctattctggcataaaacagctttgtcgtatattaatctatcaacaaaactccatttgaaatacgcattatatgatgaaaagataagttacagtgaataaaatgcgctttacaaaatcacagaacaccgacgctctaagggtttactatgtaaaatttcaaattcacgttgtatgtaaatttatctaacggcgtttaaacatgcctcttattgttagttttgagctttgtggtattttttatcagttgtgtggtatttttatttggtagcacagtatcaatctcttctaagatcaaacaacaactaagctagtaacatagccatgagttataaataagataatgtaactgataagtctgatatctaattactataccaacatctacttgtacttcttttagttacttacgtaaatttttaaagtactatactatcttattatttgtattactaattacaattcattaacaataccggttagtactattacacacattcttgttacaagtatttgtaatcaacatccattactttcagggtagataaatgaatggtcaatggaaatacactcttttaataacaaatttcttcgttgcctagcaacgcatcacggagattatgtatttccaatggaaattatcttgaaactccgaactccatatttatctattttatcactcttataggtatataaataagaacattgttagtagtaaaatgttgaaaatataatacctaatcatatcaacaaacaaaaacacaaacaaaaaactatacaataatgagagcagtaattttcggatcaacaggtaatgtttcaaaacaacttgcgactaagttagctaaagatgatgtcgaaacagttgttattacacgttctgcaaataaagcagatgacattaaggcttttggtgcaattccatctattggtgatttaaatgataaagatttaataaacctgatttaaaatggaattctatttcaattgataaagcagctgaagaaatggcaaaacttgggtttaataaagatacaattttaactatttttacctcattatcaccatcatcacatgatgaacttcatagtgaattatattataatagagatgacgttacagttattaaaggtaatcattcattagaagagtacgttacccaaatgaagaatacaaaatgattacttaatttctttttttaatggtatatctttaatcaagtattattattattataaatataatgtgtactcgacttaacttttaatgtagagtggtcaaaatgcaatgtatctaatacaagttcagttgattaatttttttctaatcaatgattacttgatccttctcagccgttctttgagtatagtaaaatagtatagaggtacctttaatttaattttaataataaatttaacaatatagataaaaaaaaaaattatatgattttaaacgatttaatcctacttatcttacttattactacacaagacaggaattatcgttatccatctaatatcaggtaatatgcaccttaatgataataataagttgacgagaatatcagagttttacttgtaaacatatacgcattaagctttagtaagcagaagaggaaccagactttctacttgtattatttcaaatgcttatctccgaatcgactaccctgtatatacatttccctgactgaaaaactgctatctttttttatttcctgaacaaccagtttagtccattgaagttgaatttttcaatttttcaatcaacttgccattagatttgcagctatctaaagtttatacttatagtaatttacttgagatcattagagtgttcatccgtcgttgaaagccactttcagcttcccagggtttagctctgacataagatcacggacgtaacttcccaattgggaagtgaacccttatgataaattttaattctccggccttattatttgattatataatctgtctctaattttcggagataaagaatatttctcgggaaaggttgattgcaatatactataggtgttttgtttatatacatcagtattactaatgagtgcatatatataaagtcaatggtatcccaaattgtaggtcaggatgtagtaatgaataattccacttgtattccttctactatttttcattcttagttttaaatcaagtgttacttacgttaatttgctatgacagaccaaattgattcaagttcattaaatcgtgatgattcaaccgttccagaggaaatgaaatttactggtaattatgaagaattaaataaaacaattaatcgttcagttactcaagatattaataataatgtcatgactagattatctactttatctaaaactttatctcatatgaatgcaaatgaaatggaagttttccaattagatgaaaaagattttgacttagctaatattttacaatatttagttaattttaatcgtgaaaaaggttataatatgaatgaaattgatgttgttttcaaagatttaacagttattggtaaaaatactgctgcctcagttttaaaagatgtatccgatgtttttttcaaacctgcttcaattatttataataaaattcaagaaagaaaaaatccaacctcttcttataatcttaaagatttaccaaatacaagaaaaattattagaaatgttacaggttttgccgctcctggtacaatgactttagttttaggtagaccaggtgcaggttgttcaacttttttgaaaacaattgcaggtgaaactcaaacttatcaaggtgttgaaggtgtattaaattataatggtattgattatgaaaaaatgtcaaaagctttaaataatcttttagtctataatccagaattagatgatcattttccatttttaactgttgaacaaactttaaaatttgcaatttcttgtaaaactccaacaattagatatgatgatagttcaagaaatcaatatattgaaaatatgaaagatttatatgaaattttatttggtttaaaacatgttgaaaaaactttagttggtaatgattttgttagaggtatctccggtggtcaaagaaagagagtttcaattgctgaagcaatggttacatcagctaatgtttattgttatgataatgcaactagaggtttagattcatcaactgctttggaatttaccaaagctttaagaacttcaactaatatttataaaaattcatcaattgttactatttatcaagcttctgaaagtatttatgaattatttgattatgttaccatcttataccttggtagacaaatttattttggtccaattgataaagctgtttcatattttgaaaatttaggcttttggaaaaatcctcgtgaaactagttcagaatttttaactgttgttactgatccattagctagaaaaattaatccaaattttgaaaataaaaagagtattcctcaaacagctgatgaatttgaacttgcttggagaaattcacctgaatttgctgaattagaaaatcaaattaatgaaaaattattaatgaaaaaagatcctgataatcaattaattcaattgagagataatcataatttagtcaaacaaaaatttacttctgaaaaatctgtttacactgtttcttattttactcaattgaataattgttgcaaaagaagatttcaaactgttgttaacaatcgtgcataccctttaactttactttttgctgctgttgttcaatcattagttactggttctttattatacaatactacttatgatactgtcggtgcattctcaagaggtggtatcattttcttttcatgtttatattttgcacttatgtcattagctgaaactcctgctttattcttagataaaccaattttaaataaacaatatggttataaattatatcgtccatctgctgaattacttgccaaacaattaattcaattgcctgttaactttcttgctattacatttttttccattattctttactttttatcaaatttgaaaacagaagctggtgcattttttcaatactttttatttgtcaatttagttgttcaagctgttagttctttatttgttatgctttcatctattatgcctgatgcatctgctgctatgggtatttgtggtcttacaatgatgtcaatggttatttattcttcatatatgattcaacgtccttcaatgtattggtggtttaaatggttttcatattgtaatcctattttatatgcttttgaagctatagttttaatgcaatttaacaatttaaagatgccatgttctccatttgaattaattcctaatggtccaaactattctaatattgatactaaactaaatcaagtttgtggatttgttggtgctgctgcttctaaaactctttataatggtgaaaatgatgttaatggtaatatttatttagaattagctttcacttatacttttaatcatgtttggagaaattttggtattatgtttgctttcattattggttatattgttatttcatgtattattgttgaaaattataatcctataattgcatcatcagataaattgattttcattaaaaatgctagaattactaaaaaaatgtttgaccattttcgtttaattgcatctgatgatagtgctgaaattgaagttgacttagaaaaacatgaagatgatattagtgccactgcagaatctataaacaactctgaatcttatgattataagttaggttctgaagatattttcacttggagaaacgttaattatgttgttccttatgatggtgctgatagaaaattattagatgatgttcaaggttatgttaaacctggtactttaacagctttaatgggtgaatcaggtgctggtaaaactactttattaaatgttttatctagacgtactgatgttggtgttattactggtgatatgcttgttaatggtaaagaaatgggaaattcgtttgaaagaagaactggttatgttcaacaacaagatgttcatattgcagaattaacagttaaggaatcattattatttagtgctagattaagaagaccaagaagtgttcctgatgaagaaaaggttgaatatgttgaaatggttatgaaaattttgaatatggaagattatgcagattcaattgcaggtatttctggttatggtttaaatgtcgaacaaagaaaaaaattatcaattgctacagaattagttgctaaaccttcattattattatttttagatgaaccaacttcaggtttagattctcaatcttcatgggcaattgttcaagtgttaaaagatttagctaaagccggtcaagcaattttatgtacaattcatcaaccttctgcaacattatttgaacaatttgatagattattattattaaagaaaggtggtcaaactgtttattttggtgatattggtactgattcaagaactgtaattgattattttgaaagtcatggtggtagagtttgtgataaaagtgaaaatccagctgaatatattttagaagttattggtgcaggtgcaactgcttctgtagctacagattggtttgaaatttggaaatcaagtgatgaatatattaaagtatcaagggaaattgatgaacttcttgaattaggtgcattagtaaataataaagatatgacaaataaagaatttgaatcaaaatatgcaaccccttatagttatcaattatatgaagttttaaatagaacatttgttcaaaattatagatcattaccttatattatgccaaagttttcattaacattacttgcaggtttattaattggtttttcattttgggatgcaaagcatacagttattggtatgcaaaatgttatgtttgctaatttcttatctattattgttagtgcacctttaatgaatcaaattcaaactcaagcaattacatcaagagaattgtttgaaattcgtgaaagtaaatcaaatacattccattggtcttgtctattattatcacaatatcttaatgaaattccttattcaattgtattttctacaatttttttcatttgttggtatttcccaattcaagttgattatgatgctccttatgctggtttatggtggtttacttattgttttttcttccaattattttatccttcatttgctttaatggttctatatgctgctcctgatttaccaagtgccaatattttattaggtttacttttcagtttttgtatcagtttctgtggtgtttttcaaagaccaaatttgatgcctggcttctggaaatttatgtggagattatcaccattgacatattttgttaataatcaattaggtgttacattacatgatagaaaagttacttgtagtaaaactgaatataattatttagaacctccaaatggattaacatgtggtgaatatttagatagttattttgatgataatactggttatgttaataatccaaatgatacaagtaattgtgcagtttgtcaatattcagtaggtgatgagtttttagagagtgttggaattcattatggtgatagatggagaaatattggttttttttgtgcatatattggttttaatttatttttaatgttaggtggttattatattttcagaattcaaagaatgtctcctaaaaaattgattacttctcttgtatcaaagattactcgtaaaaataagaaataaaaattattcaatttagttagttatatagttcattaatattagttattttattctataattttgtatttagtgtttaaaaatatagttttttttcaatcattatttcaatcattactataattgatttaacagaaaaaatttttacttcaatcagaagattaaatctatacaatttttaaagaattgaaataattaaaggaaaaaagttttttggttttgattgataaaacttttgcaatagtttaaagtttaaaagattccaagttgtaatattagtcaaagaaaaattcttcattaccaattttcaaagcttttgtaacagctgaacctggaccaccaaaaaaaattcatcaattcttaaatgtaatgaaggggaataactatcaggtttaacagcaacatattttgatgattcctttgatttattgaaaaaagaatgtaaataaacactgttttctttcaaagtataataaatttccatttttcaatgatttgtggcagttttttttaggtgcttttcaagctaacaattttgttactttttgtcagtaactttatttgattagtatctcattttgtttagttatttctaaaatattatttgatgtaaagtatggttggaaatgttttttcaatataatgttatactttaatgttataataataatgctgattttaaagctttttgaatagttacgatagtaactgattgcataagcaaatattcaaaattcatgtagcttacaaactaataatgagttctttaaccttacagattcaaagtttaaatacaccgtgggaaaaagtgccaatttttctcatagtaaaaaaatttttttcaaaattttgactaattttcaattttcaaatgtttataactaaataactacgcatctacagattaaatgtatagtatcattgtaatgagggaatctaggagattctaaccatagttttttagggaaaagtcaatttttaccatagtaaatgtaattcaaggtggctcagtcattttagtctgaatttttaaatccggattacgtaataaaaataataaaaggctcatcagaatttgtacatgtctttttgctatcttctctttatttacgtgtttcttttcctttttctctagtttctcaataactagagggacttaaacacaatgaaagtcgatgaaaatgaatttgttcatttaatcgatactgaattgttggaatttatgaagcaaaatgtcatgtttgaggatgatcttacagttgatgctttaattaccaatcttcaaaaaattataaaaatttatgcagatcaaactgaacaattggtaggtaaaatggaactccttggagtagcaacaatgatagcaagagaatatgagaaagatatttctttcaaaaaatctgggctaatgtataccgatggtgacattgaaacttacaacaagacaattgatagttttagttctgaacgttccgtttggagttataaaaaagtctacagatatttcggtccaggtatagcaaaaaaaaacatgggtgaaaaagcatttaaatatttaaaagaaaaaaagcatggaaagtatactggttggcttgacacacttacgttttcaggtgttaatcttggaaagtcattaaagttaccttataaaaaaagaaaagatatgaagtataatgatttagagacagttgataaagattcattcaaacacttaaaggtcaaatgtgtcaattcagctttaattgtcaatcacattgatgaaactataaaaaatttatgcttgttcaaaggatggaaatctaaaggtcttaacccagttaaaaggaaaaggatagataaaaaaagacctcacttcaacgattattcttccgatttaagctcaattgaaaaaaatgatgttccagtgaaggatataaataaacctaaacgtaaaggagatggtataaaaagaatgaaaataaaaattgaattgtttaagaaaatgactcctgaaaaatttgaaagaagatcaaaaaccaaaaataaaaatccaatttccttatcaaatgaatcatcagcatcagataatgcattaacaacaagtgaagaagatgaagcattggaatcatcatcatcatcagatgaagtattaataccaaatgaagcatcaattgattctgaggaagtttatgctgaaaattctcaagaagctaaaaaatatactcaagcaagaccatcaccggcattttatgatatcccagatgatcatatgccagataacgataatctgtatgataacaatcaagagaatgataatttgaataatctgaataatgatttaaatgagagtttaaataataattcaaatgagagtttaaacaataatttaaatgagagtttaaataataatttaaataataatttgattgagaattttgacaatgaaccgtttcctttagatgaacctagagaaccagaggaagatgaacagactagtggctcggaatcagatattagtataagtatcccacctgcattagaaactaacaaaagtggaaaaatgatatcatcaaacagatacttcaataggattgattcaggaagtaaaacatatttcaaaaaacatttacaagttgatgattctaacgataaaaattttattccaagtgatccaatcattgagcaaaatgaacctgataatacattaattgataatgatgttcctgatataaatgaaaatacagctgtacctgatgttaaccaacctactgaaacaactgacaataatattctttcaattccagatatagacacacctgacattgataaatattcttgggaatatttggtaaaagatcttgattttgaaaagtatgttcattttatgaacaagagttatatggaacagttcaaatcaccactaacgttttttacattttatttgacatcgaccaataagatatcaatgactgatggtaacaaagcattaaaatatttatacggtagaggttatacagatatagatgagctagaaactaggaaattacatgacagagttcttaaactttggaaagaaaatcagactggtattaccattaagttttgtccatgtttacaatccctatatttctttgaacatattgatgataaatcatgttatgcaccagatccaccaaaaaaggaagacatatgtaaacttggtataaaggatgccctctccttcagatatgagtcacttcaaactgcaatggtaactatgtatatgaatggtgaaattagagaactgatgttagaggtaaaggaaaaagcaaaaaatagtagtggtttctatggtacagtaaatcaaggtctcgcatataaggaatccttaatgaaagaatccagaatgaaaaatacatttgttttcaatatttgcattgcttcagatgatttcaactgtcaaattaaaacttataaaggaacaaagtcctttgcaattatttttttagacttaccagagtctgttagatataaaacggactattgtcatgttcccataacatttttaaccaaaaaaaatactattggttttaccggtattatggcaaaacccttgatgaaagaaattgagtacctcactaataaaggtgttacatttttggatccaactacaaatgagtatataactttcaaggttaatttgatctcctttaccggtgatattccttctatatcaaaaataacggaaacattaggtcaaaaaggaacttttccttgttattcatgtcgtataccaaaaacaggtactaaaattttagtaaaaccacttattgattcagaggatgaggaaatgaataatttggaccaagatcctgaaacttcaaatgaaaatgaagattctgtatgtgacaaagtattaaagaaaatttataggtttctcaacgaagttaaagtttcagcagaagaatataaaaacataataaaagagaaaaagtttggtggaaaaaaagggtggagagttaaaacagagcctttaatctcacattgtgatgcaattgatttagatgtagtgactccagatttgatgcacagtttttatgagaatgtttttgcaaaagcagtttgcacagtgtttccaaattccaaatttaaagctcttgataagaacaaatcaaaaatgtttatggattatcgagagagaattcataaaaagatcaaatcatttaaagtttttgaagatccaaaagatacaaaaattttttttaaaaatgaaatgaatgatataaaagtgaaagctgtggactcaaaagctttgagccatatgttttctttatattttttaccttttgaaaaagaacttcttgatccatcattggaaaatgattatgttatgatagtaaaatatttattagaatataatgcatattgggtcagtcttgtttcatttaatgttcctgaaaaatttttagatgatgatggtgtgaacagattaagagatgggttcatgaaattgggtttaaagctagagtctctgtatttagatgagaaatatgaaccaatttttgggaaattatttcaacttgcaaatcatactatgtttcattttttatctgattgggaaaggtttggttcttttagagatatttggtgtttctatatggaacgtgtttgtggtgatctcagaaaactatcgagaccaagtttgaatgttttcaaatctcttcaaataaaattaagttttatgacaaatcataaaatgttttatttgtcaaactttaaagatgatggttttttgtgctatacttatggaagatcaaaaactttggatatcaataaagaattattaaaacaagctaaaaatttaatgaggaagtatgacttgaaatcaaacaatcttatagttaaaaggctaggctttatttactctagaaatactagaatagagaaagtaggaccaagaagttttgcaaagataagaaagaatgatcaatggattttcataagagtgaaagagatattattatttatgttcgatgatgccaatgttttaagtataaagtacaacaccatcaatatttcagatgtttggttaccatgttacagtaaagatctagaatttatttttgctaggtttatggaatcagagaatgatgatgaaagatgggaagaatttgatgattctgatacattatttggtgttaacattttagaagaatttcgtaactttatggttgataaacacccagatttttctgctgtgttcagagaaccaatttagatctttactttaaacctttaatttgctatataagttgcttttaaactcttttataattgtgtatttatggtaaaacatgattataattcatgttatatttgaaatacaattataatttatgcttacgtaataaaaataatgtcattgcttcttgaaagttgccctgtttggttattactatcttaagatccccttctttgtttctttgctttgccactctaatctctttctttctacaggaataaaatctttactaaatgacttcaaatcatattaatctggacaacaatttcgtcatagaatatgatataaggtagagtaatgactctatatagttttttgtttcaaaaatggcaccgtcaactaacattattcgattttttagagggcacgatagtttaaatagacatatcatttctatggagtttagatacatcaattcagtgtgtccagatatcaatttacactttcatcctttgttcattaaatcgttgcttatccaagcaattcatttgaggattgtattttacaattttactttcagaacagttaccaaattattgtatgaattggcaagagactcgaaagaatttaatgatcatccaataaaagatatgaagaagctagttaagttttgtatgcagctctctttagattatattactgaggaagaacttgaactgatgaacgatgatgaaacaccttcgtgcgaatgttgataaatctctcaaagattggcttgggcgagtattaaattactgttcatttcaatctatgagattctattggatgattatcacttgataaaatggttttaagattttcaatattaattgattgttacaatttaattcattaatccctgatgaaattaaagcctttgaagtaacattatttaatattgaaaatgttaaaattgttttattaattggtagtttatttattgcaacttcaaagcacaattgtagtttgtaagggaaatgtaggggatgtttcatcattggctaattggttcattttttttcttaatagtttttgctcaatataataatgataagatgaagaataataaactgaaaaagaagaagaagataaaggagggtgaaatatgtttcttcttatcatgatgttgctaagtttgtgattggtagttttaaaattctatttttaataaagtgtaagacaaaattatttgcttatgaattgtttgcttatgaattatttaatattgtttgatattgtttgatgttgatactatctcatattgtttgttgttaatattgatttttgagtcttcagcattatcttttaggttgctttttgttctcttttgggtgtgatttttttgatgattactaatacttgaaattcattgccatattgttttaatttgtcattttattttactgtgttcattaacttttgtttgtttttcaatggttgttgttgcttgatgttgcttaatgttgcttgatgttgttgttgatgttgggtattgtttgttgttgcttttttgatctttttttctattttattaaggtattggtattattcaatgctactatggtgcttataattcaatgatatgatgttaggtgtatggtattaattgattcaatattttaattgctattttacaagaatttttactatttttactaattttcattgttgaatacctggataaatgctgaacctatgggtcaattaacatcttagatgtattgttgacacttcaatgtatctgctggtatatttcttttgttatttaagctcttaattaagtgtataaagcctatttaattctaacctatttaactatgaaatattacgtaatcactataaagatgcttacctaataggtccggagttattacgtaagcgtagtttactaaggaaatttgatgatttttgactaatttttactaacaaatttgtatggtaaattggctccaaaagttccaaagtcaatgttgccagagattttaaaaattattttttgacaatgtgcgaaatttttcccacggtgtatgtatatatatatatatatatatatatatatatgtatttgtattttaacgacttttgttcttattagcttgttattaaaaattagatatgtagtagtaagtaggtgttaaaatttaaagcaaaatcaattatttcatgaaatgataaaaataaagtttgaaaactaagttaggtaagaaagcaccactttattaagtattgtaaatttgattttaaatctccatctttagattcatgtattattatctttataaagaattgaaagtttatattgcaatgtgtaggttgatacaaaaattcgttttaacatttacacccaatacatactaatacttttggttggtgacagaaaagcaagtaaattaatcttatcttatcctatataaatttatttacaaaactttatttgaaatacgtattgaagattaagtatggtaaatttcaaattcaatttgtaataatgcatgaaatcatcactcccttaatacttatattactaatcaaacactcatataaacaaaattcattgtttcatagccacgtaccacggagattaacggtatttccaatggagatatatcttaaaactccgaattccatatttatctattttaccactcttatcggtatataaataagggtatttccagtagtagattgtacaagaaatataatgaaccttaatgaaccttaataagtaagtaaaatactatacaatgatgaaagcagtaattttcggatcaacaggtaatgttgcaaaaccactttcaattaaattagctaaggacggtgttgaaacggttgttattacacgttcttcacaaaaagcagatgaaattaaaggttttggtgcaattccagcagttggtgatattgatgatggggaatttttattaaatacattaaaaggtgcagattctgtatttgttaattctccattaccttacactcaaccaaatattgttgaattaatcaataaacaaatggaattgattgctgaaactattttacaatctaaagttcctaatgttgtttatttaagtgcagttggtgcacataaaccaggtatgggtggattagaatttcattattataatgaacaaatcttgaaaaataaattaaatggtgtcttaaacagtcttacctttgtcagaccttcaaaattttattcgaatttattagttaatttaccagagattgaaaagggtgaaattaattcatttttagataaaacgaaaatttattcatatgtttcattagatgatatggctgatactattagtgaaattattgaaaatccaccaactgataaattgaaaattattaatattgaaagtgaaagaattacaattcctgaattaactaaattatatgcaaaagttttcaataaacctgatttaaaatggaattatgtaccagctgaaaatgttgctgatgaaatggaaacttatggatttaatagagatacaattttaaatattttcacttcattatcaccaaaattccatgatgaactccatagtgaattatattctaatagagatgatattacagttattaaaggtactcgttcattagaagagtatgttaatcaaatgaagaatttaaaatgattatataattgatgattacttaataatcaattaattagtaatggaaactattattattattaatatgattacttattcatcttttctttctttgtaatggtatttgtaatataatttataagtttatataactttgaatatgaattactgttattataaatactcatgtaatgatctattggtaaatttttatacttaattcttcttttttttttctttataataactaatcaatcatattatattatatgtcacaagataaaatggtttcattaagatcaatttttaaagtaatttatgcagctgaacaagcagaaggtgtaggtgctagagttagaagatcaattggtacttcaggtatgagaaattttactccatttcttatgttagatcattttaatgtttcacctaatgcaggtttccctgatcatcctcatagaggtcaagagacagttacattagttatgaaaaattatatgttacatgaagattttacaggttcaaatggtatacttagacctggagatttacaatttatgacagctggtaaaggtattgttcattcagagatgccatattcaattgatggtaaaaatgttgaaggtatgcaattatgggttgatttacctgaaaatttaaaacattcaaagccaagatatagagatttaagatcagaggaaataccaattgttaaaccaaatgataaagttgaagttaaagttattagtggaaaatcttatggagttgaatcattaaaagatttagcttatacaccaatggattattattggtttacagttttaccaggtggagaatttgaacaatttattaaacctgaatttaatggatttttgtatgttttaaatggttcaattgaattaattaatgaaaatgaaaacaaatttgaaaaaattaatgaacattattcagttttctttaaaagagatggtgattctattaagggtagagttccaaatgattcttcgaaaactgattttgttattattgcaggtcaagcattagatcaaccaattgttcaatatggtccatttgttgaaactactaaggaaggtatttataatgcatttaatgattatcaatcatcatcaaatggatttgaaaaagctagaggttggtcatcagatattggaaatggagttgatgaaggtcttttcagagttaaatcaaattcgttatcaagtcaaggtttaccattagaagcaaaagatcataaaattattctaccaaaggatgaattgtgagttttttccttttactattattctttaactattactattattctattattctattttataaacttatataactaatacataccatgtataataacccataataacctataataacccataataaacccaataatagttagtcaccccgtattttttcattattcgcatataataataataatgagaggctgaataatttattaactttactggtaacggttttcttttagtttattgtatagacaacgaacaatggctttgaatactagtctggatgcaggttcaactcagacgagacagagagcattatattcatgtgatagatgtaaaaagaggaaaagagcttgtaaaaggtataataatttaacaggtgaaagatgtttcgataattcaactcaatgtgaaaattgtgcattatcaggtgtaatttgtcaaacaacaataactagaaagaagagaactttttattcagttagtgaaagttcaatagttcaattaaaatgtttaactaaaattgttaaggcaatgttcccagagagtgatccaaatagttttacagatattgaaaatatagctaaattattatatgttgatttacctgataaggaaaaagattgtaaaattattgaaaatggtaaacgtcgtgatagtattaagaaagatggtattgataatgaaaatgttgatgttgatgttgatgttgatgttgatgttgatattaataataataattataataataatggtattattgatgatgaggaagagaagggtgataacaatataattaataatcaagctataatatctccaatattgaatgaaggtacttcactatacaataaccataattcagattcaagtccaacaatatattctaatacacaaccaataaataccaataatgataataataataataataataataaaaattcagattcaaattcattagtaaatttgaaaagaatagctgatgaattaggtacattacggcataataaaagaaataaaatagatgaaagaaattcaaatttaaatttaaattcaaattcatcaaatcaaaatgatcatcatcaaattggtttaggtggtgcagaacgtttatttaatgctttattagaagttgaaaaaaggcaaggtcatcatgatgaattaccaataattgatcaaaataatgttttaacttcagtacaaagtcaacatcaatatacaccttttaaaccaacttttataattgcaggtaatgatattcaaaaatattttgtacttgatacaatacccaaggatgaatgtgaactttatacaaatttcttttttgaaaatattgatgatgttcatcatattttcaatgaatcaaaatataggaaaagacaaaatcaatttttccaaattttaaatgataaatcaaattattatgaaaaattaaaacaggaaaatttcagtaatgaagaaatttgtacaatgtatattgtttggattttaggaaggaaaggttatttattagatttatttgttaataatagagaaaaattaaataatttaaatttagtttcagacaatataataaatgatcattttaatgcaattcatctttgtctttcaaatattttcttttcaaataatttatcaactgttaaattactttattatacaagtttatatcattcgactattaaaaatagaacttcaacttatcatttaatttcaaatacttgtttaaaacttatttgtttaggttataatagagaatataatgttcaaaatttaccagatgatgaacaagaagatattagaattacattttggtcatgttttaaattacatatgattaattgtgcaattttaggaagattaccaaatatatcattatatgaatgtgatattgaattaccgaaattatcaaatattaaagatgatttattgaaaaagactcatttagcatcaattgaattagttaagataatgtttttaattttgaaaaatagagaatatttaacaaaatctaaagatccttggactcatcaaaattatcttaatgtattatttatcaatgataaattattaaaatgggatgatgaattagattttaaaattaggcattatcaaagaccaaaacctcaaagatcacaaattaaattacatattcaatatcattattcagttatttgtttaatttcaccatatttaattgcatatgcattaaaaccaactgaatcaattaattctaatttagattttattaaaactttatgctatggaattaattcaagtgtcaaaattgttaatgttatactttactcatcaatttatcaaaattttaatggtttattgtatcatgatttattttacgcatataattcattaatggttttattattaggttatacattaataaaaaattcaaatgatcgtaattcaaataaatataatatttttacaagtattttacaagaagaattcaaaattgatatatcaaatattttaaaagcaattaataatattaaaggaataaatgatagatatggttcaactgcaataagtataatgaaagatgcaagtagtaatataacattacttttaaaatattttaaaatgaatgattcaattgatgaaaaggataataataaaaataataaaaataaggaaagggaaaggaaaaataaatcaactaaaaaacattttaaggaggaacaattaagtactattaatgaacataaaatatctggtaatattccaaacaatttttctattaataataacaatataactaaatcaactttactgaatatagatggtagtatatcatcaaactcttcaacaattagtaaatctgattcaaattctaataatccatttgataatacagaatcaacaccatttgaatatggtagtgtaccattattaccatcatcattacctcaaataccaataggttcatcaaataataattataatactccaaatttatattcaaataattattatgatgaaaatatttcacctgtttcaccaattattaatatttctggattaacaaaacattctaatagtataaataaaggtgaagaaactcaaactcaaattcttgtaccaaatcaaacattgaatcaacgacaaaatcaaaatcaacaattaaatattgaattagagaaacaaaatgctgaaataatgaatggtgattttaataatttatcaacattggataatgatttcttagaaattattaattttatgaataaagatgttgaaaatacaaatgattcattattttgggattggaataagttattctctgatagagtatcgcaagagtgaattggctaaaataatatactatataaaaataatgtacaatcaatatctaatctaactaactaactatttatttatttctttctttctttctttctttatttatttatttatttatttatttatttatttatttatttaaatcgatgatttcttttactattattcttatttactttaacaacatcaccaatttcagtctttgcacgttcaagagttataggtttactaccaacatacttaccattcatttctttataacatttaagataatcttcaggatctgcaaaacttataaatgcaaaacctttattaacattttgcttttgattatttgaatctttaggtattttaacttttgataatgatggatatttaataaatgtttcaattaatatttcttcagttacatcaattccaatattaccaacaaataatctataatgacttggatcccattcaactaatgatgaatcaagccatgttttaccagttttaggatctttccttataattgctttatcttcatgtttgtgattagattttaattttgtaattgtatctacatctactttagatttattattactatttaaatattgatctggtctataacctgatgctgcacgtctatctgatgttttatatgagttatacacttttttaggattcttagtaatgggtttagttctgttcattaaagttgtagtggaaagaatagtattttattattgttaatagaaaacttttcatgttgatttgaaatcgctgtttaagttaatgcatgtttattttgaataaagactgttatatactatagacaatgttattgttagtgaaaccacttataggtggtaaaatattcagtgggagaatagtaccaattgttaaaccatgtttgaaaacatcatttataatgaataaaccacgatttttccataattcttcaataatattcaataacaaagagaagaagaatgatggtataaataaagatattatgataccacataaaggtacacaaatttcatctgatatttatgaaaagaaagaagttatttcaagacgtgtaccaggtgaaactaatcaagataatgatatcaaatcaagattcccaacatcattaaattttgaaaaagaagcagttccaacattattaccaagacctggagtacctgcaccaaataaatatccattagctagattatatgatgcattaactaaaaagactgaacctgaattaatttatgaagctgaaccacataaattatattttgtattttgttgtgcatttgctttattatttgtaatttatggtattaatgcatttaatattggttataaattatcatttgcaatgtattgaagataatgatatgaaattaaatgaatttcaacaaaatttacaattaattatgcatttatcaattgttacaattttagcttcattaccattattagcaggtattgcatttttattaattccttcaagattaattagaagaatttggtatttaccaccaattggtgtaaatggtcaaattagacctgatggtcaatcatttattaaatttacaactcatccaattttaccaaatagaccaactccaatttatattttaccattaggtacattacagaaaagtttaacatctaaaatttatagtggtaaaggattttatggtacaaatgattcatcattttttttctttttaagagaaggtcaaaagagaataccttttattgttgataggaaaggttttttttggggtgatggtagagttttcgatttattatttagtaatgattcaattgataaagttgaaaattctaaaaaaattgatgaaatttatggtgatatgattagagagaggaaacaaaaggaaattgaaatgaggaaagaattaggttttggttggagaactaaggcaagtgctaaattaatgaaggaagatattgaaaaattaaagaatttagttactgataaatctgttccaacaattaataaatctgaaaaaaatgataaatctattaagaaataggtatatttttaaatattactgtatatagagattttttgtagataattaaaaataaattacatcaacataaccaatttttttcgatatataatacataataactttccttgatctatcaattctaaaattatacccaaataatttaagatcatttaattcacttttaggattattcactaatatatctaatgcaaattcttttaaaaatttttgccaaaataaaatcattaaatcactttcacgttcattgaaaatttcaacactttgtgaaatataaccttcaaaataaggttcattatgttgatattgaccttctcttgcaaaataatcactaatttcattttcagttattggtaatgaatgttctgtaataaaccaatatttcatattatgtacaattttcgatctaataaaagcatcaaaatatgttaattgttttaaatttttctgattttgtataatattaatcagtttcctataatttaaaccatttaaagtattaattgaaatccatagtttatgtattgttgtatgttcagtcaggaaattcagtactgaataagtttgacaaattttacaatttctgtgactttgaattgaaatttcttcaatatcatctaaatatagtgagagataagataatgttgtattcatatgatttaatgaattattattaaaacaattcttatgacttactcctttatgagagtattcgaaaaggattaattttaatgatttgatttgtctaaatggtataagttgctttaatgaattaatcatttcacgttgatttcctcccatgaaacaatcgattaattcaaatttagttaagtttttgaaaatgaattcattattatgttttttaatatctgataaactttcaaaaaatgaaaaccatacaggtgtatccttagtaccatgaatatctgttatatttttcaacgttaaagattctaaatttttcaatatattaccatattttaaattttgtgataattgtaaaagttgagtatctctcccccattcatatctaattgttaattttttcaatttttttaatttttcaattggtaaattacaatcatcaatttgaaccattatatcaagttctttaagttttgttgtatgtaaaatcatttttgatatattagtagttgaaaattctggagctgaaagtttctctaaatttggtgatagatcaagtaagtatccaaaactatcaaataatgtaagtgattgattaaagaatgggaatttattttctaagcacgttatttcatcagtggaaaggaaattatctaatgtttgattccaaactgtctcatcaaactcgattcttcttgtcatatctgcaaatagttcaattgatttcacatatgatccaatatgttgattagttaaaactttatagattaataatagtaaatttttcgaagttttaataattggaatatttttctcaagcatcattatactgttcttaaaaccatcagtccatataaaatcaaatatagtattttccattatattttgtctttcaagttgtgaaattgtatcaattcttaaatttttgtaaatatgtgaatcaactttacacctaattgcagaacatgtcattgataatgaaattatatccattgttgataaatcttgacaaataatatctaaaatatcttcacaacaatcggagaaaatgattgattggcatgtctgtgttattattgatggtagatacttgatggagttgatatttggactttttcaataaaccaacggatttcgttccggagttattccttttgagtgtttgtgaattaaaaggagtgggtgctttgttaattggttttcctgatggtatttcctctgaagatactttcataattgattggataataagagatagtactcaaagaagaacagacaccataagaattaaaagaaaagataaacttttcagttgtaaaagataaaatttttttattatgatctgtgaattgataagaaaaaatatttatttattctattacgtaatacccactatagataaccattcactaccctttgtacctaatgtatccactactactgctattacttcctctatgaaggtatatggtactgttttatctctgtttgaacagcttattaggaacagaaaccccttaagacatatagtttccagttcagttgggtattttctcaaatactcctgacctattcgaaacaactctacacatcttttgatattctgtgtttcaatagtatgtatgaaatgtactgtaaatttattatctttatgtaatgattgaatgtctactggtttacgtgctatggttaatttttttaattcatctaatgttattgaatcaattgtttcatatatgtttttagttgttaatgaaagtgaactaaaatcatcatcaatccaatcactaaaactatcatctttttctttaaattcttcaagaattgtacgtttatcattatttatcacatcctcttctccttcttcttttcatcattatcatataatccatcaacgtattgtaatactttcctattcccacttaatatccatttagtatttaataatgttttagctcttgctctaattgttggttgaaattcaaaacacatatttaaaaattctttacaattattactaatattaattggataattaattttttcaccaataccaactttatgacatgcaattaatggattaaaattaccaaatggtggtatacctgttaacatttcaattatagttgcacctaatgaccaaatatcagattttggacttgccattttatgtaaaataatttcaggtgctaaccaataagctgatccattcattacaattttttgtaatcttttattattatttctattatgatcatcattataatcatcattattttgatcatcccattggaaacttaaaccaaaatcacaaatttttattataccattattgaaaattaaaatatttgatgctttaatatcaccatgaattatacttttatttgataaataattaattccatctaataattgacatgttataccacatgttataaattcaggtataccattttgatgtttaaatgatttaattaattgatataatgaaccaaatgatgaatattccatagttatacacaatttttcactactatctttatcattatttttgataatattataattaatcaatttaacgatattaatatgatttagttgtttcatgattaatgcttcattaattaaactatggtatattttatcccttattgataaatccacggtatattttctttgttgatgtggtgattctttaagatatttttcaataactgaattaatatcaatttcctttactgcataccatttagatgattttttattaggtattttgtatattttaccaaacccgccataagcaattagttgtttatcattgtagttcatctatcaatacatgatactctaagaaagaggtgtctattctatcctttaagagatcaatcatataatattcatggaatgttaaaaaaacggttacgtaatacagacgcgactatttatggggctcaactattaagataagataagataagaagtatttaaataacagtttgatcaataaaatgcttttcataaaagacttctaaataataataataatacataaatataaatataaacaggataataaataattaatgaattaatgggcaaaacggaaatctaatctttgagatccttgatctgtagtatttttaatataataatcttgttcctcagatgtcattgcatcccatttttcagctctatttttattaagtttccaataaaaccatttacaacctaataaaattgggaacatacttaatgcaaatgcaaataaaactgcattacctgtatgatataatggtttatcatttttacgataaatatttgatgcaataattgcacctgcttgaacaaacatattataaactgatgcactaacagttctagttttaatactatgactatttcttgaaacaattgaaaccatcattgcatgaatatatggataacctaaacaaattgttaaaactgcatatgtcccccaatgattaactaaactacctttccaaaatcttaaaacaccaacacaaattgtaccccaaattggttgaattaaacaaataaggaaaatacttgaaaatttttcacttagttaagttgatgttaataacattataatttttaaaacattatatggaaaacaaagtaaatttgtatggaaagtactaaatcccatttgtcttaataataatgtcatataagctgtaattgtatgttctggcatataagcaacaataccaataagataaattggccataaacgccaatcctctaaagcttcccaaatcatttttaaacttaaaccttgtctattatgcatatcaccctttgttggatcatctcttaaaactttattaacaataattttttcttcctcttctgtaaaccaacctttttcattccaccatttctttgtttgaacaggtgatggaaccattaatataaaaccaacaataccaacagttaaagtaataaaaccttcaattaggaataaccatgcccaacctggtttaccatgtacaccacccatatgtaaaataccataagcaattaaataattaacaatttgtgttatatacattgcagtccaaaaaaatgataatctaattggtaattctgaacttgtataaaaatatgataaccaaagaaccatatcagcaatgaaaccaccttcaaaaatacctaataatgctctacatgcataaaaactacttttaccatttaatttaaattgacaaattgttataattgaccaacaaataacttgaattggaatccaaatatctgaaccaatttttttagaaattaattgtgatggtaattcagctgcaaggaaacaaacaaaaaaaattgtattaccggtattataatcattagttgataatttaatatcttttaataaattatcagaaactgcttgacttaaatttgttctatccatttgtaaagcagtgaaaaggaaacatgcaagtaatgtaacataaaaatctaatttataagttaatttcttttgttgtgccttagtccatttaaattctggatcaaatctttctctacattcatattttgcatcttcatagatagctgcatatttttctctgaaaacttgattcgtaaatggattatttgcagaatctggtgcttcatcataattttcatcaattgatgaatgatctttatctgagatatatttagtgttaataaattcttcctcatttttaatgaggatatactgttatctgatttatttgacattagtgaattattcttgctatgtgatatctagtaaaaaagaatataagaatggaaaaaatcttttcataataccggacccttagctatatttatacaacattctcaagcattccaataccatcacactaccattacaataccgttccaataccgttaccagacgaaagcagtaatgtcaaagatttgaaccctggagatagaacttcccaaataggaaatgatgagaatttcatagaaatttagtgtggcagagaatatttattattaatatgtggcattgtatccacagtttgttattatattatattatgaattataaaataaagactatataaagagatatgtccatatccattatggcttacatctaccactgaatcttggatataatgaacaatctctaactgtaaatctgttacataaccaagctaaaattctttcagtacctaaaccataaccaccatgtggacatgtaccataaactctttgatcaataaaccaataatatgatgatggatctataccttctcttttaaaacctgcaattaattcatcaacattatcaattctcattgaaccaccagtaatttcaccaactgttggcattaaaacatcaacactctctgtaactcttggatcatcaacacatttcttcatataaaatgatttaatttcaactgggaatcgatttaataaaattggtacaccaattgtatctgtcatttttctctctgcagcttctgcaatatcatcaccaaatttaaattctttaccttcttcatttggaataccattttcatttaaccaatcaattgcttcaatatattccattctcttaaatggcatttgtggtggtacaaaacctggatttaattgtttaactaatggacctgcaattggatcttctaaaacatattgaatagttttagtaataacagtttcaatgtgggaaagtaaatcttcaaatgataaaaatgctaattctgcttcaatatgagtatattcacttaaatgtcttcttgtatgagatttttctgcacggaaactttcttgaatacaataaacatcacctaatgcaggtaataaagtttctaaatataattgtgatgattgagttaaaaatgcttcttcaccataataatccattttaaataatgttgaaccaccttcaacttgagtttgaaccatacatggaggtgtaacttcacataaattttcttcttgataaactcttctaattgatgctaataatgatgcacgaactttcataactgctgataatgtttcacctcttaatgttaaatgtcttctatctaataataatgaaggatctgaatcttctgcaatttgatttgtaaatgaatctttaccacttggtgctaatccaacaatttcataataatctgcaactaattcaactccacctggtgctgatttaccttcaggtaatttaacaattgaaccataaattgataatgttgattcaactgttaattgttgagtttgatatgcatttgctaaatcacctgataaaacacattgaatataacctgaaccatctcttaaaacaataaatgcaacacctttttgaactcttaatctatgaatccaaccttgaactttaactctagcaccaataaatttagaaacatttaacatcttgattttttctgcctttggtaatgatttatcttcaacaatagaaattttcattgattctaataattttgcactttcctctgcatctttggaagctttttcttcagctaatttcttagccttttcctctttcttctttaaaccttcaacacctttctttgctttctttaaggcagaagcggaaatttcaaaataacctgcttcagtttcttcagttgcatctttataaatttcaactttagattctggtgaaacgtataatgcataagcagcagattggtatggagattccttagtacctgatgcagtatctgcatcaacaccagtggtaggatggacgtaaacagtagacattatctaatgaaacttaaaagaaaagcagtagtgttagaatgaatcattgatttccaacgtccaaataatttgaaaatctccaatttttttgaacgcagtgagggtaaattaaatttaaatttcatcgacatgatattttccatttcgaatcttatcactagggttttccttttggttggtttggcaagaagatcatatatataggatatgttgagaacattgggtaaactaacaattcgtaacaaaggaatgagacattatcaaacattacaatctctcatcaaatcatctccctatactgaaaatttaaaaactgatccaaaagttccaactccgggacaagtaactgaaaaattaagtaaaataccaagacaattaggtgaaaatggtggatttttcacatacacttatccaactgaacgtaaatcatatagatttttatcagcatctgaaagagcattagaagatcttaatttagatccaattaatgaaccaaaatcaaaatattttcaagatattgtatcaggtaaggaagtggtcaaggatgataaaattcatccatttgcaatggcatatgcaggtttccaatttggtaattttgcaggtcaattaggtgatggtagagtaattaatttatttcaagtaaatggtaaaaatgatagagaatgggaattacaattaaagggtgcaggtaagacaccatattcaagatttgctgatggtaatgcagttttacgttcatcaattagagaatttattatatctgaatatttaaattctattggtataccaactacaagggcattggcaattactgcattacctgaaagtaaagcacagagatcaattgttgaaatttgtgcaattgtttgtagaatgtcaccatgttggattagaattggacattttgattattgtagaatgattggtgatagagatttattatttcaattatgtgattatcttaataataaagtgctgggaaatgaatatagtaaagaattgaatgattttttggaaaatgatgaaaatttaaaagaatttggtgaattaacatattatgataaattatttttagatataattattaaaaattctaaatctgtttcatattggcatgcatatggatttttaaatggtgttttaaatactgataatacatcagttttaggattagcaattgattttggtccatttgcaattatggataaatttgatccaaattatacttctaatagtgaagatcatgaattaaggtattcatttaagaatactccctctgcaatttggtttaatatgatcaaattagctgaatcgatggcagaaatattgggtgcaggacctgaattgattaatgatgaaaattttaagaaatatggataccctaatgatgaagcaattgaaaatgcaggtaaaagagttaataaattaattagaattgcaggtgatatttttgaaaaaatatttattgaagattatttgagattaatttgtaatagattaggtattaaacctagagagaatgataatgcagagatattaacgattttatttgaaactttacaaattactaaattagaatataataaatttttcacaattttacaagaaattaaattaagagatgataccaattttgattatgatattggcagcaagtgaatttttaactgatgatttgaaacttgaaggaaaggaagaagagagggagaaaataattaaagaattaaaatcatttttagcagttttcaaattacgtgttgaagatgaaatgttaacagatgaagaaagatttaatagatgtgttaattataatcctaaattcataccaaagaattggatattacaggaagttattgattatactgatgataaattaagaaataatgctagtgatgaagaaattagtttatatattaataaaattatgaaaatgagtgaaaatccatttgataaaagtaaatggggtaatgaattaaaggaattggagaataaatggatttctgatgttgaagattccaaaatgatgttacaatgtagttgttcaagttaagtaaagataatgtttatgtatttatttatgtatttaatgtttataaaaatgaaaacctataaaattaattagctaatttttcagtaactaaggcaaattctttaccttgaattttagcaatttctaattctaatggagttggttctcttttaccatcaggaccagataaagtacctgctccccaagctgaaccaccatgaacttcattaatattacttaattgagggaaagcacttgcataacctaaaggaacataaatcattgaattatgaacaaatgttgataatgcattaacagctgtcatttcattaccaccaccagtaccagttgaaacgaataaaccgaaaggtttatttttcaatgaaccatttgcccataatgaaccagttgaatcaaaatatgcctttaattgggctggcatattaccaaatctagttgggataccaattaaaacaccatcacaatttgttaaagtatttaaatctgaaattttataaggtaatttacctggtgaacctaattttttaactaattcatcaggtaatgtctctttaacttgataaattgttgcattattaccagttgattcaatacctgccttgacagattctgccattttagcaatatgatggtataatgaataaatgatgatattaatttgttttggtgccattgtttgattgtttgattgtttgaagtggaataataattgacttagaattgtgtactttactatctatttatactcataagtatacatcgcttaataatcagccatatacctatattaataatcattactaagtatttctaaaatacgtaatgcatattatctaatcttttgataagcttcggagttagtgcacgtgactccgggcgttgtttcctttttgggcgcgttgttgacgttttgcccaaagaggaaatgctgatgtttctgtacatgttgtcgattcattattatttgataatttaattttgattttaattttaatctttaatctttaatctttaatagaataaagtttgtcattgcagtgattctattataaccaagttgtttcattagacataaaccatgtctgataataatctcacatctgataatactaacaatgttaaaattaaatcaatgatacctaattctaaatcaagaaataacttattctttaacactaccacatcatcatcatcatcaccaaataaatcttcaacaatactaaaatcaacatctcaatatattattcaacaatcgaatgatgatatttataatgaaaaatattggtcgttaatgattccatcagctgcttattttcatatctataattccgttctcggtgatgtatttgcaatggtttataatgataatttaacaaattcaacttcaaatactttatcaacttttataattgctaaacatggttgttcggtttatcctaatattgatatatcatcaaattcattatattattcagctattgaaaatttaaataatgaatttaaatcaagtaaagttaggaaagctttagctatttccctattgaaaagttttgcagatcttaatgaggatataattaatactttatataaacaagctaatttaccaataaatacttttgattgggatgaaactcaagcaggtttattagcttctcaaatgaatttaattaatactaaatctcctattgatgttggttcttatttatatgatttaggttatttaactcaaagtttatcaactggttcatatgttgttgatgttatttataatgaagatccaaataataattcattatctgaaaaaaataatgctttggctttcctattgggtaaacaattagaacaattatttgatccattgtcggaatattctcctgaaccaacagagaaagcttataaacctccatctgatataaatgaaaagcttttaaataatatcaatactaataataataacactacaaatgacataaatataaatatacaaattgatgaagattcagacctcgttaaatcaatatgttcagaattattatcagttcaaactaactacactgttcaattagttcaatttttacaaaattttgttatacctttacgtattcaagttttagagaataaattaccaggttttacaacaagtcgattaaatcagttattccctccaacaattgatgaagttactagaattaattgtatatttttagatatgcttaaattagctcaaccttatggatcttatgaaattttaaaagcttgtggtaaaacaattccttatttttataaagctcaaatgagacatgaagctgcaattaaaaatttccattcagattatttaaattttattaatgaaattaaaaaaattaataaattaaatttattaacattagatcaaagatcaattgaaactgcaatttattcatcattaaatttagttaaaattcaattaattattcaaagattatataaaaataaaatttggcctaaagaattaatagaaaatgtcaatctattaaaagattcatgtgatacaactatatcatcatttgcaaatgataaattaataccctataatggtagaattttcactccaactggtaaaatattaacagaaattgccaaaggttggccatcagaattacaaaatggttggttaactagaagagttgttgcagttttcgatgcaattgatgtacttaatcctaaaattcaaaataattcagttataataattttcagtgatcatgttttatttttatcaattgatgatgatgaatattattataatttatggaataataaggaaaaaaatttacatcaaccttcgatttcagatattttaatgcattcattaacaaatgaaactcctttaactaaattacctcatatgaatgttaaatcttggtgtaaaattaattcacttaatgcattatattatacaagtaatatagattcattatttatgactaaaattgattcaccaaattcttatattagatttttcaatgaaaatgatccttcatttacaggtatttataaattagaaaaagtttcaggtaaatatgttactgaagttattgcaagatctaaaatattaaataaatcacaatcatttcatttattctgtggttcaatagatgatgaaaatgaaagtggggaaaacatcaataacaataaggaagagaaaataagtaaaaaagtttattatactgcacatgaattctcaacttatattgaagaagaaactaaatcaccatttattgttttatttaatgaaaaatatgataaagaattactcaataaatataatgtttatgcatttattacattaaattttatatctgatgatgttgttagattagaaggtttatcaagatgtaaattcggtattgatgaagaatcaaataatgaaaaatttgtatatgatattagaattgaaatattaagtaaaagtttatcaattattttaactgaattatttgcaactcatatgagtttatataatccaatgatgcttgattatttattatttaataatggtaaagttaataataatgcaaagaatatattagatgtaacaaatgaaaaattagataaggaaaaggaaaggataatagaaaatatcaataataaagtaaaggaaaggaaaattataaatgatattaaaaatgataaaactaataaaaggaaatcagttgaattgatgaaatctgaaccaatgtctaaaccaaaggtaaagaaagtgaagagtaaagaaaagaagaaaggaattttcagtatttttaaatcaccaaaatcaaaaatccaaatcaaactaatctaaatctaattctaaaatacaatctaaaccaattactaaaccaagagttattaatctgaaggatgaacctgaacgtaaatcaagtgttctttataaaaaagttagtattaaaagaaataaagaaattgattattctgcattaaagcctgcaaaaccgaaagtaactaaaccaagactttcattaacaattgctgagtttactaataaatcagaaaaaaaaatcgataaaaatgataataccattcaagaaagaaattaaagatatgaatgataacactgatgaagctgaagctgatgttgatgttgatattgatattgatgtgcaaaaatcaaatgcttccactagtatttatgttaattctaaatttgagttcccaatggaaccaagttcagaaacttttaataattttaaagaaccaaggtatgcaccattaaaagattcaccaagaactaaaggttataaagattcgattgatttaatgggtaaatttgaagatttaggtaattatgatgatgatttatttgaattaaatgaaaagccacaattagataaacaagttgatgaaataaaatcgattgattcaccaactgctgaactcagcgttgttaataaagaaataaaggataaacaaataaagactaatcgtacaatttggcgtgatataacaaaaccaattataattgaaaaaccaccagcagctaaattattaccatcacctattaaaccatctaattctaataatatattaggatcaatttcaagatctgattcattttatataagatttagaaaattaaggaaattacaagatgaatcattacataaacgtggtatttcatatatttcagatttaagtagtttaaagaatagtgatcaaaaagcattagattctggtatgttattttcaattgatgaaacaattgatgataatgaagaaactaattgggaagtatttgatgatgaaaaggagaaaaagaaagttaatgaaagtgggagtgttagtgggagtgttattattaatttatcatctggaaaatcatcaaatagggtattatctaaatcatctagtgtttatttatcatctaatgaaataatgcataatgagttatttgatagtcttgaatttgaagatactattaatccatatgcaattagtgaaaaggaagttgaagttgaagttgaagataatgtatttgtggatattgatccaacaattgatgaagtattagttgaggaagcatttgctaatattgatacaattccaatgtatgatgatgatgatataattaatttttcaattgatgataaaatgggtaatattgatttccaatttgatgaaattgaaatgaatttaataaatgaacttgagaatgaaaatgaaaatgaaaatgaagttaataatagtataccaagtttaaacactgataatgataatgaagatgaaaaatttgaagatgaaaaaattaatttatcaatgttatcaattgatttaagttcatttaatatggatacaattaatgaatcaaatattaaacaatcagatacaattattggacttaatagattacttaatgataaatcatatgcatatttaaaggcaatattccgtgaatcaccaaaattattacgtgattatagttataatgcaccaattggtaaatcactttattatctatctaattatcttaatgatgaagagattactgtttagtaatttattttattctattttatatacatgaaaaataatacactttaatttaataaaccccataattaacctaatcttctattatttctaagaacttttggtaaacctttaacatgacctttatcagaatcatttataatcatgaaaactctaccactttgattcattctaccagttctaccagctctatgaactaaatctgatgaatttgaaggtacatcaagtaaaataatatttctaataccattaaaatttaaacctcttgaaagtaaatcagttgtaactaaaacttttaatctattattatcattagtacttggttctggtggacttgaaaattcattaactgtatctttcctaatttgaacatcatcatcacttgtaatacctttaacattatgaccaaaagttttcaatttttcaacaactccatttacatcttcctttttattaacgaaaacaacaactcttttaatgaatccctgttctgtaccatcacaatgaattgcatataatgcttgagctaaagctttaattttagatcctttataaggagcaacagatgcattaattaatctaaattcaattgattttggtaatttatgtaaatttggagttgaaattgatgtaattttcggataaatatgactaattgttttattaaattttgatggaacagttgcacttgtgaaaattaaatttgataaattattcatatttttcaaaatatgataagtttcatcaataaatgaaggatccattaaagtatctgcttcatcaactactgtgaatgaaattttagagaaaatcatacgtggtgatgaaatggatggatatttagataatgatgaaagtttaccaggtgttgtaaccattatatcaatacctttcttaaataattcaataaaatttttataatttgaatcagtatcccatttaattatattaagattaagagatggtgcaacattagaaactgtattgaaaacttgatcaacaagttcatgagttggtaataaaataactgatttaataccagcatttgaacctgaatttgaaggttcagcagttaataaagattgtaataaaggagcaagataagcccaagttttacctgaaccagtttcagcagcaatagtataaacattaaagaattctgatttattaccattaataattttaattgcagcagtttgaacaggagttggacgtataattaaaccatttaattcatttgttgatttaattttctttgttggtgaaacataattttgtgaacgtaaaacggtattatatttaatttcattaattaaagcctcacgtaattgaggtactatttttaattcattaaaatctgttattttatcaataagattattaacaccattacgagatttttcatcaggtaaatttaatgaagggtatggaccaaatttataaggtggataagcatcagcatttgatgatgatgaagtagaggaatttgaatttgtagatgatttattcaaagatggaccacgacctctaggtccactatgacgtaaaaaccttggtctagcgtagtaccttacgaacttctgcattgttttaaaagaaaagaaagtatacctgatatagaaactgaaaaattaaaaatttcatgttaaattttcatttatagtgagaagagctttctttatatataggggaggtattgctgagccgtatagtttattcttcttaaagaccatacgatatggacgtgtttgagagacttacagcaggggggacatcccgtcatagcacacatacaacacctaagggtaagaaatggtcagtgagggattttaagattggtaaacgacttggaagggggaaatttggtaaagtttatgttgcaatggagaaacgtagtcaatttatagttgcattgaaagttataagtcgtaaagaggtaagtgcatggaaagttgagaaacagttggttagagaggttcaagttcaaaggaaattaaaacaccccaatatattatcattgtatacatggtttatggatactgataatatttatcttgttttagaatatgcagatggtggagatttatataataagggaccattacctgtaaataaagttaaacccataataaggcaaataatggaaggattgaatcatttacataatgcaggagttgcacatagagatgttaaggcagagaatgttttattattgaagaatggacaagttaaagtagctgatcttggttgggcaacacatattacatcagtcaataccagacgtacaacattatgtggtacattagattactcttcaccagagatggttagtggccaaccacatggtaaacctgttgatgtatgggcagtgggggttcttatgctacgaattacttactggtaaggcaccatttgaaggtacatgatgcctctaccacctaccagaagatcataagaggcgtcgcatcgtccgacttcaagataccaggttcacttaatgaaagtgggagggagttcctctgccaaatgttgactcgcgatcagtggaaacgtccatctttcactgagttactgcttcatccttggttgaatagtatagaagtagacaagggagagacaatgtcattagctagttcattacctaaagttatcactggatgggaaaaaagttaatttacccacctctttacctgctttaaaggaaactttagttaatcttattgaaaatgataattatcaaagggcacaattaattattaatgcattaccacaatttgccaatgattcatcaattttaactgaagttgcatatatttattataaactcaacaatcatgaaaaattaagtgaaataactccttcaacaattgctttaaaacatatatttgcacaatattattattcaaatggtgaaaatgataaagctttacaattatataattcaattaattcatctcgtgatgcaaatgatatagctgttaatattagagcagtaatttcacaaaagttatatctttcaaataataatgttgatattagtattgattctttaccatcatctgatattccttcatatgatgaacttttcaactgatgctcttattcaaattttctcaaataatttaataaatgctcaaaatttacttgaaaaggctaaaaatttagcaattaattcagtttcaaattatcctacaacttgatgcattcattgaattagctccaattgatcttcaaattgcttatgtatatattttacaaaaaaatatttctaaaagtaatgatatattagatgatatttcatctcaattaacttcacttcttaatcaatatccaaaaaataaaaatttacaaataattaacctcattttacaaaataataaattaagcattattgataatgaatcagtagtatctccttaccttcattttcagagaattaaatttcccaaattcaattgaagaaactcgtttaaaacttacaatccctcaactttcaatatttaatagaaatgaacttttattatcaaatcaaattaataaaacttctaaaaatactataaaaaaatttattgaaaataatcctaacaatattacattttcatcatcatcaccaattaataaacttttacaaaaagttcaaaaatttattaataaaaataataatcaaggagcaattgcttatttagaatcttcaattgatattgttaaacaacatacttcattaattgttttattagttactttatatgaatcaattaatgcatcaaataaagttcaatcatttttatcaagtatagtatcatcatcatcatcaaatgaaagtataaatgaagaattattgaaatttattcaaatgaaacttaataaagatgttaaatcaatacctattaatgaagaacatttatcatcattaatttcagatattgatgtaaattcattaaatttcccaacatttaataattcaaataatcaaaaatctaaaccaaagatgattaaaaagagaaagaatcataataagaaaccaaagaatacacattcaaagattgatcctgagagatggttaccattaaaggatagatcatattataaatctaagaataagaagaaaactcaaggtggaactgttgattcaggtttaagtatttaaaagtagttagttttatataatttctatgtaaataaagtatcttcatctctaagatattcaccaatatcaccttgacggaataatacaatattagttggttgtaaatttctagcttcaattgttgattttgctgaaattccaaatcctaaaggtgtatcattcatactataaacaattacacctgcatgttcaggtatatcttcactcattttaccaatatgtgcctttaatacatgattaccataaaggaatggcatttcaccatttgctttaatccaaattttaaattttgcaaattctgataaatattttaatgatgtaatatgtaatttgaatttaccagttttagtaaatttaccaaaacatacaccaactgacattaaattctttcttgcaactgatgttgcaaattttgcaattttttcttcaatataataaactctatccttctgtacacggaaaacatgtggatttgtttcattattaactaataatgcaatatttctaccaatataatttgcaagtttttcgaaaactacctttgtttcttcctctgtaagttgtctcattgtgtttaatgggtattttatataacgattggtatataaaaagtgagtaaataagagattatgaaattaattttattttattatgcaatgaaaaaaaaaattttcatgttgatgataaatttggaaaattattttatgtaaagtttatgttatacatgttttttttaatttaatttcttccttttaaaactgtacaatgtcagaatcacaaactaatgagctcgttgatcaagttgatcaagtgggtactgactccaacaacaacaaagacagtaacgactatcaacaaggtaatcacagaaccccacacatcagcaaattggcaagtgaagagaaaagacaacgtttattgcaaaaagacacggacaagtgggtaagtttttccaaaattattaaaaattaaagagaatataatatactaacataataattatttatatagtcgtatccttgatgaaaatggacaacctgtttataaaaatgaggaaagaaaacctaaacgtaaagttgcatgtatgattggatattgtggtacaggatatcatggaatgcaattaaatccaccaaataagacaattgaaggtgaattatttaatgcttttattaaggcaggtgcaatttcaatgaataattcaaatgatttaaagaaaaatggatttatgagagctgctagaactgataaaggagttcatgcagctggtaatgttatttcattaaaaatgattattgaagatgataaaattgttgaaaaaattaatagtgaattacctgaacaaattagagtttgggggattcaaagaactaataaagctttcgattgtagaaaattatgttcatcaagaatttatgaatatttaatgccaacttattcatttttaccaccaagacctggttcaacattatcaaaagaaattgaaaatgctaatttagaatttaaagatatttcaagaaatgatgatgaaggtaataaattttggaatgatttattaatgaaatgtaaagaaatgggagttgaaaataatgaaattgaacaaatttatgaagcaaatagattaaatttagaattatcaattccattagagaatgcagcaatcaattttagaaaaatttctagggaatgtagagcaaattatagaatttctaaagagagattagaattagtaagaaaagcattaaatatttatgttggatcacataatttccataattttaccaatggtaaaaattataaagatccaagtgctaaaagatatatgaaaagtttccaagttagtgaaccatttttaattgaaggtactgaatggatttcaattaaaattcatggacaatcatttatgttacatcaaattcgtaaaatgattggtatggcatcattagttattagaacaggatgtccattagagagaattgaacaagcatttggtgaaactaagattaatataccaaaggcaccagcattaggattattattagaacaaccagtttatgatagttataataataaattaaaagattttggacatgatgcattaacatttgataaatataaggaagaaatggacgcttttaaacataaatttatttatgataaaatttttaaagaggaacaacaagaacatgttttctctggatttttcagttttattgatgctttcaatggtacaaatgagacaactggagttccaattttccaatttttaacagctagaggtattcatggattagataatgatattaatcatgatcaataaattacgtaaattttatacctatttataatttaagtattttcttatcgatataactaccaaatgaagcttttattatttaaagtatgataattggaatagatctgctatgtaccgacgcgtcgacgttaataataattacctaattaagaaaaatgagacgatttttcaggaaaattaacggttatcacttgtcttaaaatgatgattattattaaaattgcatgtttttttacttaaaagtggtgatattatttaatgatcttatgattttttaattaatggggtatgatatgaatgaagtataaaagcaaccatgttgtattgattatttaatgatagaaataattattatttttttttatcatcacacaaacaaacaaataacagatatatactaatgacaaaagttggaagaattggaccaaacccatatgttgcacaacttgctaaacatgtaccaagagttggattatggtcaggattgatggttgttttctttggatggccaatgattgcaccaactactaataaagcaggtatttgggcaccataagaagagtaaattaactctataaaatgtatactataacgaaatcatttattcatcaattatatccacttattcaattctagataatattatataacataacttatttaatttaaaagaaactattcggaaataatataatgcaacataatagaacaaagaacatttccactagtgtataaagtctaaaatagtacactaagttaagaaaaagcttctatcgtactaaaataaaaattagtgtggttttccccacattaaatcgatgaccttggtgtatgctgagccttcacttaatttaaaattattttctcttctcggccgtaagaattatccgtaatagtgataatattactatatagtataataattataccacctaccggcacggatacagttaacaagtatactatgtaggtagtgtatagtataggataggataataactgaatgagagacttagtatacgtatatcaacttactattagagtttaataaactcaatcgtactcacacaggcttagcattatgccaatgattaaaacgtttcttgacagtgaaaaagaaaaacttttcattctttactaatgtgctcaaacaattaaacactaatgagatcggttttatcactagtgtttctttataattggtggcttaaataatagtaaattgttatgacaacaaatttttcccaatattatatgaacttttgctatgtaagtgtagtatatatcgtgatgtagtaaaaatcttttctattgttattgttggtgataatcatcgataatattaataagttaaaccctaactcaacgccacaaaacaattttcttcatatatcgtattcggattatttctattaattaatttacattcatcatattcagtttatcttatttaaaaattattccttacattcatctctaatttagaatttatatctatcgtgtttgatcattcatttattacattacttacgttaatgtatttattttgaggcggtattattttctttaatcgttgaactcaatgaatatgtgtcaccatatggttataaatacattacattatcccctttttgttaattatttttaatttattaatccttatgaatatacatatacattatattcattacccatatccatatttattatccaaattattgattaagtatagtacaacccttaatataacctgaatatattacggaaaaatttattaacaataaacatacgtcacagcaattgaatattgaaaaaatttaaacgaattaggtgaaaatggaagcaaatttgaaaatggaagaaaataacccacttaacaaaactaataatataattggaaatagaaatgataatgatgtttctaagaataatggaaaccttactatagatacaatgccattatataaccacaataataataataataaaataatgcaatcaccagttcaagcgcttaatgaaaaggttgaaatttcaaatattgaaacaaatcaacaagttttaacaagtattcaaagaaataataatagtaataataataataatagtagtaatagcaacaataatggttactattcatatttaaaaaatcaatcaaataatattcaaaataataactataactataattataattacaattataactataattcacaatttcaaccaccacctccattaccaaataaattatcttttgcataaatcatcaaattcaacaatttcacaaaattcaacaacttattcaaatgaaaaaacaattgattcatcaactttttcacttaattcatatccaactacaagttcatcaaattatagtaatccaagcataaatagtaataataataataataataataataataataataataacaccgtacctaatataccttatccatcaagtaaagaatattataataatccaatgttaatgattcaacaacaaaatcattcatcaaatcaatttaatcattatgaacaatttaataataatacaactcaatcaatttattattatcaatctaataataacaatccaaatttaacttcacctccacctccacctccacctttacaatatcacaacaacaacaacaacaacaacaacaacaatgttataaaacacctaatttagtattaccaactcaaatatactattcaacgcaatcagtaattcaaatccattaccacctttacctaatggatttatgaaatcaaataataataaattaccaattaaattagatgaaacttataaaactaaaactgctgtaccatggaatttaaaggatagtatattattaatgaaattaagggaagatggattaacttggaaagaaatttctaaaaaatttaaagataggacattaaatgcatgtcaatttagatggaaaagagttatgattaatggaggaattgatgcattaattaatgctgaaaggaaatatggtgatttagaggatgcagttaaagaaggtgtttatagattacataataaattagaatctgagaatgaaggtattgaagaaaataatgatattgaagatccaagtattatacatggtaggaaaagaagtcgatctgaagaagatgaagagagtgatgagggaaatagataatgatacggaaatagatgatggaatcaccatcataatgataataataatgatgataatgtacataagaaaatcaatcagggttaaaaggataatagagcagcataaaagtcattcatttctgtttgtaaagtttatagaacgcatttgtatttatatatagattcttgtattataaatgataaaagaaaatagaataaagatcataatattaatacttcctaaataggaaggtctaataaaagaatctgatgatgcgaatcaattttgaaattaactgaggttgtccttattccaatcttaaggctcattcctttttcttttgtaaagtagagctattatacaatgctaggattagttattgcaccattggcaatagcttcattgtttggatacattgtattgaaaactgaacctacttggtttagaaaatttaataataaatatagaattaaggaagatttacaattagttggtatacttggtagtttctttcatcattatgttattcaatcattaattactaaacaattctcattatggtatgaatttgaatcaaatgcaactaatccaaatgttatgaatacaattgcaattaaatatccaaaatcctatcaagtggtaaaaattttaaaattgatggtgaaaattcatttattgttgaaaatattacttataaaggaattctatgaatcaattttacgtatgtcatatattttaaaaaatgaatttggtattgagaaaggtgatgttgtttcattatattttatgaataaaccattatttttaataatttggttttcattatggaatttaggtgcaatacctgcatttttaaattataatttaacttcaaatcctttagttcattgtattaaagttgttaaatctaaagttgtacttattgatgatgaatgtttagagaattttaataaaacaaagcaacaaattgaaaatgaattaccaaatgttttattaaaaattattaatgaagagaatatgttagaaaaagttaataataaaattaatgaacaatttcgtgaaattaattcaattagagatttaaatgttaaatattgggatccatgcagttttagttttcacttcaggtacaactggattaccaaaatctgcagttaattcatggagaaaaatttatatggcaactcatgttttccccaaagcaatgcatttttcatcattttcaaatatttatactgcaatgccattatatcatggtactgcatcaattttaggtgttttacctgcattaattgttaaaggtacaatttcaattggtcataaattttcattatcaagttattggacacaaattaaaatttgtaaatgtaatacaattcaatatgttggagaagtttgtagatatttagttgattctaatgaaacattaaacgagaaagaatgttatggtaaaattcaattagcttatggtaatggattaagacctgatatttggatgaaattaaaggaaagatttggtattaaagcaattggagaattttattcatcaagtgaagcaccatttgcaactacatgttatgaatataatggtattggaattggtgcaattagaaataatggttatttagctgataaaatattatcattacaatataaattagttaaaatggatccaaatgatgaaacaattatttatagaaatccaaatactggattatgtgaagtaccaggatattaatgaaaagggtgaaatgattatgagaattttaaatcctaaaaatattaaggcaacattcccaggttatgttaatgatgatattgcaacatattctaaaattattagagatgttttcaaaaagggtgatgcatgggttagaagtgatgatttaatgagaattgatgaattaggttgtatttattttgttgatagaatgggtgatacatatagatggaaatcagagaatgttagtacaactgaagttgaaaatcaaattttagaatttaataaagaaattaaaaattgtgtaattgttggtgcaaaagttgataatcatgaaggtagagcaggatatgcattaattcaaacacaaaatgataataaagatattgaaaataatttaaataaattaaatgaaatacttaaagaattatatgaaactagtttgaaacatttaccacattttgcaagacctgtatttgttacatttcaaaatatttcattttctgatagtcataaaattagtaaaaaaattttccgtgatccaattttaccatgtggtaagaatggtttactgaaggtttattatttagatggatcaaagaaaacgtattcaccacttgatgataatatttatgctagaataacaaatggtgatattagattgtaatgataaagataatgataacattgtccctccggtaccggaggtgagaactaaaaaagcaaaacagttaaaaaacctaataacaataaaaataaatgccaaatctattccggaaaaaccagtgaaaaaaaaaatgagaaaaatcagtcatcatcatgttattactattgtccaatcaataactttgatttataatttataaccttcttttcagaatagaacatacctttaaactacttattctctctctctcttttaactatacactacatgactgtatgtaataccattcataacagtaaaagtgaaataaaaagtgaaaaagtgaaaaaactccgaaaattttcgccaattttctttcacccatttgaaaaatttcaaatgactgatttttcaaccacatggtttctttattgggggattttattatattattcttatctttatttttatttagaatatctttactaacacatccttatagcaaccatcaagaatgttcattcaaaatcctaatgtcggtaacagaaataaacctgaagattggagaatttcaggttataatccattaactccacctgatttattacaaagtgaaattccattaaaggaaattaatgaaaaagttattataaatggtcgtaatcaagctgttgatattttacaaggtaaagatgatcgtcttttaattgttattggaccttgttcaattcatgatccaaaagctgcattagattattgtaatagattaagtgaattaaatgaaaaattaaagggtgaattacatattgttatgagagcttatttagagaaaccaagaacaactgttggttggaaaggtttaattaatgatcctgatattgatggttcatttaatattaataaaggtttaagaatttcaagagaattatttgttaaattaactgaaaaattaccaattgcaagtgaaatgttagatacaatttcaccacaatttttaagtgatttattctcctgttggtgcaattggtgctagaacaactgaatctcaattacatagagaattagcttcaggtttatcattccctgttggttttaaaaatggtactgatggtacattaggtgttgcaattgatgcaatgagagctgcatctcatcctcatcatttcctttcagttactaaacctggtgttgttgcaattgttggtactgaaggtaatgaagattgttttgttattttaagaggtggtaaaaaaggtactaattatgatgaaaattcagttaatgaagctcaaaatgctttaattaaggcaaatataattaaagaaggtgaatcaagaattatggttgattgttctcatggtaattctcaaaaaaatcataaaaatcaaccaaaagtttcagctgaagttgcaagacaaattgcttcaggttctaataaaatttgtggtttaatgattgaatcaaatattgttgaaggtagacaagatgttcctccattagatcaaggtggtaaagatgctcttaaatatggttgttcaattactgatgcttgtatttcttgggatgataccgttgctgttcttactgaattagcagatgctgttaaaactagaagaagtttaaagaactaagttatgattctttttattaaatcttttctatttagctttatctttcttttcatccccttccccctatctaaatgattctacatatatctatttttattgtacatacatattccagttgctattattttatagtatttttttttatataaagaacaaaaaaaatatttcaccttctagaataatatttttaaataactgttttgtttactgtagacataatatacaagaataaataattataaataaatatgcatttcatcatcatcatcatcatcatcattataacattttagttataatattagttagcaagtttaacaccaatactaactttccttttaccttcagtaaaatcctttaattcaacttcatttgtatgatctaataaattatcaatttctttcttcattttattcctttaattcttcatctttagtaataattaatgcattagattctaaatctaatccatatgcacgtttagtataattagaactaccaattattgtcaaacttggttgttcctcatttggtaaattaatccaaataccttttgcatgatatgaccaaccatttggtgtattaactataccattttgccattctaataatttaatacgttcattaatattttcacctgattgtttaccctttttagataattcctctaaaaataattgacaattataaacatatgcatcaggtaaataataacttataccatttgatttataaaatgaatttgattcaggtgatgcagttataatattaccaattgcttgacaattaattattttctttttaatttgtgaatgaacattaaaataacctgcagttatagtaaatttagtatttttattatctaataatgataatgatctaagaatactttgtaattcagttgattgatctggattaattaatggagtaaatgaagaaattggataaacaattgtaactggatctttttgtgatgatgatgaattttcatgatcattatcatgatcaatttcaccatcaaattgatcaattggttcacgtttagtatctttaaattttgattttaaaacaggtattaaaactcttgttgcatcactaataaatcttgataaatttaaatttggttgagatgctaaattagatgttggccaatcaagataaaaaccttctttacgatttttacttgaaacaatttgataacttaatgaactcatagcattttgaattctatgataataatttgttaaatcctttgatttaaataaataatatctatcttgtctatttgtaaaataatcttgtgataaatttgcacctgataaaataacttcattatcaataccataaattttcatatgttgtaaaccataaatttcatttaatcttttaggtgttaataattctttaaaaccatgtaaatgaggtgtgtgatataatctaagattaactctatgtttaccaaatttttcaactaatggtaaaattaatgatgcagttgatgcatccggtacatcccttgttgatcttaaacaatctaataatatatcaacttttaaatttggtttattttgcatttgattaattataatttcaattaaatcattttgatttttaccaatatataatgatgataaaaatattctattttcagcttttgatatcttttcttttaataatttataaaataattcaggatgtgtaattatatcaatttcacccttggctaattcaaatcttggtgcaattgaatcaagttgttgaattgtaccacgtattaccggattccatgttaaataattatttaatggaggattatcaactttaattgttgaaaaatgatgtttagctgtcttgaaaacacatgccattcgatgaatctgtgagttcaaggctggtaacatctttaattatagtattatatatatccttgtaaaataaacaaaatgaaataactttatataaaagaagatcaaaacttttgaaaaaattaaataattttccaattttccaattttccaaatttcatgaaagtatgtatataggaaggttatttattcttttcaatattattatagactaaaattcattgatttgaatgtataagagagtttctacaattgtgaaacgattattcaatacaatggaggaaactaaccaattaaatacatcaaataatgatataaaacctattaaaaaacgtggtgcaattgcattagttgatgaaaatggttttaaagtacgtaaagttcaacaagttgcaaataagaaacttagtaatgaaattaatgataaaactattaaagaagaggatgaagatactaattatataattgatggatcattacgtcgaacaacaccatatttttatacttatatgacatattgtaaattaagatggagagatagatcactattagatattttctctaatgaatttagattatatcctgaaagttattatattaaagcattagaaaatggtacagttacattaaatggtgaaaaaactacaaaggatacaattatacataatggtgatttaatttgtcatcgtattcatagacatgaaccacctgttagttctaaacctattaaaattatttatcaagatgataaaattgttgtaattgataaaccaagcggaatacctgttcatccaactggtagatatagacataattctattacttatattttaaagaaagaatttaatttaaatgttcatccatgtaatagattagatagattaacaagtggtttaatgtttttaggtaagactgctaaagcagcagaggaaatggttgaacaaattaagaatagagaagttagtaaacaatatattgcaaaagttgttggtgaattcccaattggtaatataattattgataaatcaattataacttatgatccaagagtttcattaaatattgttgatgaaaaaaatggtaaagaagcaaaaactgaatttaaaagaattagttatgatggtgaacattcaattgttttatgtaaaccatttactggacgtacacatcaaattagagttcatttacaatatttaggatatccaattattaatgatccaatttattcatcacctgatatttggggtgaaaaattaggtaaaaatggagattttgataaggataaagttgttaatatattagaacaagttggtaaaacaagatcaacatcaagttggttacatagaaataataatattttaaaatctggtgaattattaaatggtgaaaaatgtgaaatttgtcaacaagatttatatactgatcctgatccaaatgatttaaatttatatttacatgcatataaatatgaatcaaagtcgaaggataataataatggaaattcatggtcatatacaactgaattacctgaatgggcagaggaacatgcaacaaaatatatgaaattagcaattgaagaagctaaaaagagtgaaccaacatcaactgcattttgtgttggtgcattattagttaatagtggtaaaatattatcaactggatattcaagggaattacctggtaatacacatgcagaacaatgtgcattagataaatattttaaagataataatacaaataaagtaccaattggaacagaactttatacaactatggaaccatgtagttatagattaagtggtaatgaaccatgtttagataggataattaaacaaggtgggaatatatcaagtgttttcgttggagttttagaaccttcaacatttgttaagaataatgtaagttatgataaattaactgaatgtagtataaattatattaaagtttatggatttgaagaagaagcagttaaaattgcatctaagggacattaaatatactatactatactatactttacctttttgaacacgacttaatctttcaatatcatcatcaagtatccaccaagcaggccaaaatgattttatattattttttaaaatatgagttaattgaggatttctaacagtattatcacaaccaccaattgatgaataacctaaatcatataatggacaataattaattttaaaattagaattaattgattctctttctaaccatttaataaaataccaaacatcacctgtatgccaatctaatattggatgaattcttaaaaaatctggccatcctctatgagtatcagttttctgttttaataataaatttgaaccatatggatcagttcgacgtataccaactataattgccttaatctgattattagttgattttaaataagttgaaaatccacaaggtaatgttgaagattgtgagaataaacatttaatattacctgaagatggtgtttctatttcatctaatatttgagatttatttaaatgatttatttcattgaataatgtataaacagctgtaaaatttaatccaaattgtaaaactgattctttaaggaaattaatttgttcatcaaattcagtttctgtatgtacataaactgcatttattataagtggtgatgatggatcaaaattattgttgtctaatattttatttttataaacagcagcaaaatagattattaattgtacaagacaatctttaccaccattataggaaatacttaattcctctaaatgatgattttctaagatattgatgaaatcgttgtatgtttgtaaaactaatttttgagtttgcaaatgaagttctttattaaatgaagatgggtataatgttggtaaatgtaaatgtttatctaatttataaattttatcattttcatctaaattaattgaatttaaacaattttctggtgtggaattaagaaatgattgtattagtaaataacaagccttagttgcctctaaagttgttgtcattatgtgtttaatagaggttatttcttgtgaaaagagaagaaaataggtgaaaagttagtaaagatttgaaatttcaattttcgagagatcttttattattaatgtattggaagttgtatttatttacaagtatataagtatataaactatatatcaatatcaaggtaagaaagcatttttagttctataaatagtttcaacttgtcttgtttcaatattcattttctgtattgcaataactttcttatcctttgcattaccaatagtttcattagtttcaggtaatgttggttttaaaaatcttctctttaatttaatttgttcctttaatgaaaatgcaacactatttataattgataatgcttgttctttagtttttttattaattggtttagtaatatctgggattaatttttctaattctgcaaatgattttgtctttaatgaggataattcatcagatgttaaatttttagttaatgaaaaatcaggtgcaaacataatttctgaatcaattttagatgcaaattccttgtaattagtagatttagtatttaattcatcaatagaaatttcattacgtttatttgataattttaaatcataaatataataataagttgtactaaatctagcatcatcaattgatttaccaccacgtaaataaccatcaattgataataatctatttgcagctaaatcaagttgttcttcagttaaagatgataaatttgggaaattctttttaatttcatctttaaaattattcaatttaatatttctcttttcaattcttttatttaattcttcattaattttaggttgtaaaattttcacatttcttggtaaataattagcttcaaattctgcctttttaccatctaatacatctctacctaatcttctcttagttggttcaaaatgtggataaggtaatttatcatctttatttaatgcaataccaataaattttctctttggatggaaaggatctaaataatatttaacaaacccaggttgtaatgcaaataatgtatgatctttaccaataccaacatttacacctggataccatttagtacctctttgacgatataaaatttgaccaattttaacttgatgattttcatattttttagcacctaaccttttaccaggtgaatcttgcatatgagtcttggaggagacaactttcttatgagcaaatctaatttgacatttgataaaactcaccaaggaattcttagcggtggttattgaatataacatccttactctacagctaaataaagaattaaaagaagaacttcatgaaaatggaaagaaaactcatgaaaaattggaaaattggaaatttacacatagtcgatacgtctacttatttaggccatggtaatacaaatactctatcaacgggtgttaacttatcaacctcttcttcaccttcaaatcttaacatacatcgattgtttctgctctctagtacctctgcagggtagaatgttgtagtctccggatatttagcaagtactttactaccaattttatattctttaagtttactattaagtaaatgtaatggtacaagtataacttctttataatttgccttaaaaatttgtccatttggatgtaattcatcaggttcaggatcttgaatttcaaatcttgtttcactaattatttttaaaactctacataaaatccattcattttgaattccattaaatctacctgaatctgaatttttacttggacaatatgcaacttgtgaatttggtaagattggtgttgatggattaaaatttgatgaataaaatgatctaccaattttaccattatatgatgataatggtggtggacttggatatccatatttttttgctgctgtaatgtttttattattattatcttctgatggtggtagtggtgatactgatttagatccagtatttgattctaattctgattctgattcaagtttaatcttctttaatggtggttgaatttcctcatttttattacttttacctccaagttttaatttaaatgatccatgtggtcgtcctctacctctaatcatattattacttatactctctattttaacattattatcagattcttgttcattatttgtttcagtaattataacttcttcattatctttatctttatctttactttctatttctttatcaatttctttctcttccttaattatctctgatgtagtttcaacttctattggttcctctttattttcaaatatttctgtattagtattagtattaattacctcttcctcttccttctcactgtcatcaatactttcatcccctaacaattcattccttttattaattaaaactctaacttcatcagataataataaattattatcctccaaattatcactatttgataaattatattccatttcatttataattgaactaattttctttgttgcatctaataatttacttaattcaatattctctaatttacttacatcatctactccaagtatattcaatacttcttgtacattatcccttattaccatctccattacccttaaaagaagacatataacttcgcataacagttttaaaattacataatataatataataaattttcatacacattttaatacattaactaactaatgaactaatactcatcttcatctttaattcaccttcattagctccaggttcagatttattaccttcttcttcaccttctctctctccatctacctccccttcaatatctccctttggtccctcttctttatccccatttaattcaattttagaattacttatattaaaaccttccttaaaaatatctttccttaattcttcatcaatattatgactactatttgtaaccataattgcaggtggtaatgtagttccaatactgctattattatttccattattattattagaaacagaatattgacttaaacttgtaatactcaatctaccacctaaactaccttttctactattattattaacaaatcctaaactacttcttcttaaaactgaattaatattatttgtaatactaccaacactactaccattggtaccattattattattattattacttggtattgcccatattgaacctctacgacttaaactactatctctatcaccattagttgaattatctaataattcattactacaaattgatgaatttcttgaacttctacctctaactcttggtgaacttgttaatgattcaatatgtgaactatttggtggactcataatagaagtattgatattattattattattattattattattattattattattattattattatttattgatgttaatgatgttataccattaagatatggtgattgtaaaattgatgtaaaattatttgaattattagaattatttgatccaattgatccaattgatgcagctgaatgtcttctcttggaaattgaatcttcctttatctttcttttcctaatatattcatttgattcataatcaccattatttattgaaagtaaactatttgcagctcctaatccacttaatgattttaatccatttgatgatgatgataatggtggtgatgataaattaatttgattatttgattgttattggtggtaatttataatcatttgatgatgatcttgaatgtgtttttctcattttcattattactatcatcattattatcattatttttatttgtctttaatttattatcatttttatcatttaatcttttccttctatttgcaccaccattccaccaatttttaattgcattatcacttctaccattaagatgacgtgcaatttctgcccatcgtttaccatatttttcaactaattcttcaattaatttaccttcatcaggagtaattggagttctatttaatgaaggttttaaattttgatgatacctttctcttgcttgtttagcagttctactttctaataattgactaattttaacccaatttaaattattttcacctccaaacaatgaaactaattctaataaatgtttatcctcttctgttgaccatggacctcgacgtaattttgttaaattggtggtattagtgttggtattattgaattcagatgatgttggtattgaaggatctaatttattatctggtggataataaataggattagaattagaattggaattaggattaggattaggattttgttgttgataataaacagggaatccaattggtggataattttgataccccatttgttgagcttgtacatgcattctagcttgtaattgtgcctgtgcttggtattgagcatgcgcctgcgcttgtgcttgtgcttgtgctgcttgttgttgagataattgaattggataattaattcccatattcatattcatattattcatattattcatattaatattactcatattattcatattgttcatattaatcaatttcgagtgttccttattattagaatccataccagaatacacagaagaagaacagaagagaagagatgccatacaatagcagtaaattaacaaggtgattgcataaaattgagaaaacgaggaaaaaaaaccggtattttttactttatatagagatctttaaagattttatatagattttatatacttattgcttattccaagagagtaaattggtatcacctgcctttctacctttaataagtactgtaattattgtagcaattgtaaaagctaaacaaattataccaccaattaaccaagcaatacctaaaaatgaatttttaccaccaattgaacttgaagttgtaaggtaaataaatttaccaccattatattcagttgttgggaaatgtaatccaatattaatttgataaattccttgaattaattcatcattatcatttcttaaaacaagattagaaaaatcacttaatgcagcaggtgccatccaattttgaaattgtgaccatgtactaatatcaggtaaatttgtttcattataaccattagggaacattttaatccaatttggtggtggtacaatatctctataatcatattgagttttcttaaatctatttttattagttgaccatgcaatattatcttctgataattgataattattagattgagaattattaactgataataaagttgattggaaagtatcattaaataaagaatttgcaattaaaccacatggataaattattttaccattatcatcaattgataaaggttgacaattttgtccaattgtatccttaattgtacttatacttgcaattttaccattaatttgatcttcactaaatgatttaacatattgtctatgatttgcatggaaattagttaatttataataaattaaaattgaattttttaaattatttggaatttcaaattgaatttgacaaatatttctctcctctgggtagttggaccaatatgtcactattatttgttgataatttccattttggattaattgtaatatcagatttaaaattatattgataatattctaatggtatatcagaccaattattatcatttgccaataattgacaatgtgaataatcaatcataaaatcttcaattttattacttgtatgtaacattgatgcaccaattggtatgaaaataattgataaacaaaggaataatggtacaattgccttagctgtaagaattggatgaattgcatttaatttttgttgtgtaaatgcagtttcctttggtcttctagttttcaatttctttttatttaatttattatcatcatcaaattcatcatcatcttccattaaatcttgacggtcgttaattgttggtatctgaattattattttgatgacgtttagttaatccaccaaatatattatgcatattattctgtaaattagtaaccccctgtgagaaattcgacatattgatagttactcaaggaagatatatgtgttataaaccatataaaaaggtatataacataacataatagaaatagaaatagaaataggaagtaaaaggacgatgcgtcgggttaagattatatacatgaagtttagctatactatacttatttaacaattataacaggattttcattgaataactggtatgaactctttaattgggcattgttctttaatgtttcaacatcatttaggaatggtgtccatctattaacgatttccattaatttaacatctttactaatttcacttgcatcctttaatgcactaataattgaatatgcatgatcatattgtaaataatcggtatttgatttaactgtataaactttatcctttgttaaattatctaaattattaacagagatggaattattagataattcatttgaataaattgaggcaataattgatgatgcattaaataaaattgattgatttttatctaattttgatttatttatccaataatttaatttatcattaaatttggtaaaattaatttcattattcaatgggtaattatttttaataatcattgattgaataaatgctaaagcttcagtatttttaacactccaaattgaatcattttcattaatttgatctaaccaaattaatgtatctttatataatttataatctaattggaaacatttatataaatattgattaattatacttggttcaaggtattttgatttgctcttattcttattattattactaactctaattttaaataattcatcaagtgaaatttttaaattattaatttcatcagttgattttaataatgaaataaattttgttaatttctttttagatgggataccaggatattctcttggtgttattggatgattttttttatcaactgcattaagtgaagttaaataatcagaatttttcttacgataaacatatggtgtccaagttgatgataaatttttaaaataaataaattcatcaagttgtttcttaaaagaatagagagatgatgaggaacttgatgatgatgatgtaaaactacgtatagatgatggtttaaacattgtcttgtctaaaagaagtgttcattaagatacattacttcgttgaaaatatttcctatttaatttaattctcactatataaaaattactattcactatacagtcttatcgacttactgctccttcttactcttttcctttctttccttaaggaattgtctatatttatcaattgtaatctccttttgctttgccttatattcatcaattccatgatatgtagtattatttaatttatcccaaaatataaagaatggttgactaaaattatatttaattccaaacatttgatgatgaatatcatgataaattgaattatttgggaaaattaattgaaataaatcccaaggtaatgaataaccacaatgatcatcaactgttttcaatgttgaaaatgtataaaggaaaatattttccctttccgttagtcctaatgaaattgatgcaatacctgtacctaaagtatcaagtaaaaaaccttcaactggattattaaataatgcaccaaatgcataaggtacatataattgatgatgacgtgaatggaaatgtttatataaaaatttatttttatgcattaatttatgtaaataatattgccaagtatcaattataatgaaagcaatgaaaatttttaaaattgaaattccataccaataaataaggtataagatttctgttggaattaatgaatatttttgtttaatattccataataaattattttcataacctgattgagaatgagtttcaaaatttgaaacaattaaaccagtaattgattgaattatatgttgaaaaataacatctctaataacttcaaattgtgttactttattcttagataattgttcctcgctggggtgaattctatatttttccaataattgataaatatcaattaaatggaaataaattgaatataaccaataagctaaaactggtgcaattaatgataaatttgaatctgaaataaagggtagtaaacttgatttcggggtaatgttaattattggttctttaattccatttataagattgatatctgtattattgatgatgttcattgtgatactgaaagaaaggagtgtatgaaaagattaaaagaagttatgtaaaagtaacatgattaattatacgatcgtataatataaataataaaagaaagaaaagaaaagacccatcgacgcatcgtcttaataaatagacgcgtcgaccttttctttgattatttaattaaaatttcttaaattttttcaataggtcgtccatttaaagaggtacagtatagtatagtatagtatagtacaggataagataggacaatacactctttgggcaatggcaactaaatttagaaatagcttttggcttaaatcaaataactttgcacctcaagtttaccttttccgtaatattgaatcaggtcaagtaatttatagtcaaacacctcatattactaaatatcaaattaatcaacaatttttccgtccaaacagggaaaataagaaacctttaccacgtcatgatatttggagacctttagcagttgcacaatttaataattattttaattcaattaaagcttatcatgcattagttgaattaaaatatttacgtcaagttaaattaaaggataaagcacaaaatttaagaaaattaaatgaatttaataaaatttggtgttcaggtcaatatagaccaacttatacaatggaatcaactgctgatttaagtactgtaattgatgaattaaaattatttgataattgtaaaatttattgggatggtctttggtggagaggtgattcaaaatattggaataataaaattgaacatattgatatggaaagatttggtagaagggaaaaatttgttattttagatgaaattagagaaaaaggtttattagattatcaaaaaagtaatgatagtaatgaaattaatgaaataaattcttccactcaacaaatacaacagtagttatatcctactattacattcatgtatataatctagtttataatataatatatcgatatctaacgttacaatcaaatagataagtcaactatgataagtcatattattatgtcttgcattacgtaatcagaattttatttactaacatgattttcaatataatcattaattgatcatcaattcaatcatatttcttttccctcaaccaattaacaacaacaatgactgatttaactccaattattaaatccactgatatggtatgtatcatatagttataataaatcttaacaatactaacactataaaggatgatgaacaaaaacaaataatttcagaaattgttttaaattcttttaaagaatttaaatcaaaaccttcacaattatcttctgatattaaattaaaattagatgaaaaattaggttctccttggcatataattgttggtaaatctttctcttcaagtatatcacatgaaaaaaatgggtttatttatatttatttagaaaatttagcaattttatgttttaaaactgcataatgttataaattatatagaaaaattatttaattcaagttttttaccaattttattaccttgatcaatttcttcaatcttttcacgtaattctttattctcattccttaattcattacattcattattaactatactattttgaattattaatttttgatattttttatcaagtaataataccttattatcagtttttagaccctttttccttttcttaaatacattatttaattgtttattatgtttcctctcaattttatcaattatttcaatcatattaatataattttcaattgttttctttaaattgtaaattttttcaaattctttaaatttttcaatctcttcagtcttacttttattatattcaatatagtatcgtattatttcattatcattattataattttcttcaagtggataattcataggttttgtaactattttctcattttcttcaattatttcagtagcatctgattcaattgaatcttcactcttcttcttcttcctttttattattactaatgaaaaaattgggtattttcctaattaattccattttgtttactgtagaaagaaaggaagtttttatttaaatcaatacattcatataaatttaaaaaaaaataaatgataataatgataacaataaaaaaaaatatttgttccgataccgggagtcgaacccgggtctgcccggtgaaagcggaccgtgatagccgttacactatatcggaaaattgttatgttattaacctctatgtttgctttgtttatacctttttatgtcacgtgatttgttggttttagtattaacaaagaaagaaacttaaatggtaaatataataatcaaattaattatgttttttaacaaataatgctacaaaaacaaaaagaattattctgaatttagaatcgcaataagatttataaaagatacacatttgttattctaatatgaaaaatttagttcatattaaatctaaatttgatgaaaaaagttaaataataatctattagaaatatgttgtaatctgttgtaatctaacgactctttgggcagaatccatattttacaacaacaacagtattaaacgaacaaactatataatatataacaacataaaagagatactaacaaaccttggaattcattgtggtacttatactaagaattccaacgttgactaataatttcttttctgatttgcatgcaatactaaattttgattggttcttcaaggttcaacttaataatacaatattattatgtattattcagtctcgcttagaattaccaatctcagcaccctgccatgctcacaaatcaattgcttcttcgccataccagccgttccaaccatttcattgaatttaaccccattaaaactttttgttaacatgccagcaatcatataattagtattaataaatttattcttgactccattgttttgagtatggttggtgtctaatgtttatgtgcttgttctttgacgatgaaccgaatgttcagacaacaattcgcaacctccattatcttcatatattgttgaagctgtatttccttttgaacctactccatccaacaattgtctgatcattaatacttccttagctgcaattctcaatgccatatattcagcttcagttgaaaacgaagcggcagtttgttgtttcttacatttcagtgtggtaatttatttacctaacttaaacatgtaaccagccgttgattttctatcaactttgtcaccaccccaatcggcatcacaataacctactaaatcaaaatcagtactttcatttaacatcaagcctagtttggttgtacgtttaatgtatcctaatgtatgtttagatgcagccaaatgtttagtatagggatttttgataaatcttgataaatataaagcagcaaatccatgctgtgaaatactgcagcgtcagattttgaaagtttcaaaccatagagacttttacgaagacgacatacaatattttctggagcattgacgccacctggaaccatcataatttcttttgcaagatcaccattgagcaaagctgatccatttgatgtaccaccaacttgtattgtgcgcaatagtaaataagattttaatacttgagctactactcgtgatttaaaagttggtggattagtgttatctttgattttgaaaactcaacgacattcaattgttctttcacatgaagacagttcagtcatctctcatgtatgattttctttatgtgcccctaactccttttcaatggcaactttccaaaatttagcatcaggtgagattatggcctgcttcaaattgtagggattgaatttatagccggtgctatggaagtatctcatcgataagaccaagatcaacctctgtttgatcaaaaccttgtcccgaaacctttgaaggggcagtagatggaacagcatttttatttaaagtattaaccacggtaccattcaccaaattattggatgagacaccagaaaaaacatcattaggaatttcaattgaatttcataactcttaggcccacaatatgtaccatctaatatgataatgaatcctccttaactgctgtgggctgatattggggagtactatgatttgatattgttgcattgataaattcttcattgctagtgattttggtatttaacttaatacttttctgaaaagcttgtttagtttttttcttactcttttctagttttcgtttaacagcttgtctcagagccttttcttgtttagtaggtggaaaaattattgatggagcaatttttttgactctaatggttccgtttcttgcatgttgtaatgtctccaaggttctcattcttagcttcgagtgttggtgtagctttagttatatatgttgacgcacctttaattggaacaccagttgcacatgcaaaagcaggagctgtacaatttctagcaaaatgacttgggagttgacatcttaaatatgtaacttcatctagattccttttacttacgttttagttaagtttggattaaacgaagcattgactaaaattaaaggttttttaaaaaaggagatcaaaacaactttaagccagcacatacgaagaaggtaaaaatcatcattaaaaataaaacttcacataatttgtcgtgtgcatatcaatttaaactgggctttgtacctgaatgcgctggctataaaaaataaaaaatttgaaacacttgctgattttgctgagaatgtaggtaaactcgctaagggacgcggaaaataaagtcaaaaacaagctaatgaagtagtagcaattttattctttaaatttaaaccctgcccactgaacatggcaccgccaaaacgtttatctcatgcaaaaatttggtgtacaaaatgtggtacaacccatcctaaaaactaacgcttatgggattcggttaatggcgaaccaactaaaaccagcattaaacgcttatagatacagtgatcttggaaaagaaaaaccgtaattaacaacgcgtggttctatcagatatttatttaaattactatgtaattttatgataataagcgcttcctttgcaaacaaaactcacccagactaatgttattagactcagaggcaagtataagtattgttaataatttagatagaacatttaattacaaagatggcaaaattccattaatgcttccttgaaacctgttgagatggttaaacctgttaaactaacctcaattaaaatgcctcagagacttatttttattactatataagggaacatgtatttccacttttattatttgtattccccctcttcttttctttatgttatttacttttgtgtatcttatttaaattacaatacaaactatattttaacttactgattaaactggattttacaaataggataaccttaaattaacaaacccaagtgacccatgcccaaagcataactaataccaaaattctggtgcacattattgaaggcttatatgtgccaacaacaatgaccgatattatcggtacaaaacagcttaataaaggtggatttattacaactgatattccttaattaccagtttatgacttctcattttaccctattgatttgtaactaaattagagaaacaaatttatgaaattattttcatattcaacaagaaacacaaacacccaccaattctgattactgagcaaaaggattagaaatagactaacgtatactaatttttcattaattgatcaaacaaataaaataattgatcttacttcagacaatgaacaacgagttaaagtatcaatttggcttgcagaaatttgaaacatattacaacaagctgggtatttagtaggacccaaagatgcggcattaattcatgaatgggcccaaatgatacagtaaaattttgctgcattatattgatgatgactttggttgccattgaacaacatttattgtaacaaataaaatggaatagtattaatagtttactttcttatcatttatttagatttgaaagaatttctgatcggattacaactgacaaaggaagtgaattttgttagacttgttacttctgcgaatatgacaattacgtaataatctaataataagatctactaaaggatgatttctctatatctatataagaatctatataagaagaactacataactattagttcttcccacatattatatcctgtgggaagttgccctcttatacatatctcatgtaacgagttgccccgttacctatattatgatattattactatcaatatttcatttacttacgtaatatatcttacgtaattatattctatatttatatcattcctgacaaatttacaaaactgaaacagggaattcttacatttaatctttttgaggtcacaattagatataataatctttagctcttgcaccagttggggataataaacaattgacctaagttgcagaaagaacattcaaacacttaaacaattacaaagagtatcaacagcttcatttaagtattaattgagcatgcaacaactatgatagcaaaatataaagtgaaagggaaaatatcttccagtttagcctttaaaagtgtttattgatattcagcatactttaccagaacttacaatgatcttaaaaggtgatttttatggaattacaaactcagataatttatttactgtagttccatatttgcttttgggtatttgtgctcataataaaacttacgttggcctatcaaacggcacacaagatattgcattaaaatttaccagacggagtacttttagtacttgcactagaatcaatagtaaattcaaaaagagaacaacaatactttaactacacctattcagttccaacctaattcaaagaaactacaccaaattctgaaagcctcagaaacaataccaactagttttaaactagctaataagcttttggaatagaaaacagcaattaaattagaggttgcagaacatgaagtgtccacaccattaattcaatcaagtagcaaaattccatacaaagttatatggtttccagggtttacaaggaagaaaaacacaaacaagtaaagcttaataggtctaaatatggtttaaaaagatcaccattaaaatttcataaaacattggattcagcatttcaaaaattttagcaatgccacgcctatattttaatagtgacaaatcatttattttagcacagtatgtcaatgacttaatagcactgaagatacaagtaaatttggaaaatatgtgagaaagaaatttaaaataaaaactaatgaagatccagaattttatttaggtgataatgttacacaatcatctgacatacctaccgtaggtttggccgctcatctagaatcaacagttgacagcttaccggaagcattacaaacatatatcaaagtaggttctaagtcagtaataagtacagattgattattagaatagtcctttattacaacctattacatctaatggttttgcatagatggcatccaatgtcattttgccaggtttatcaaagtgcctgctagatactggttcaaatacttatatatgtgttcggaaagaccaatttaaaaattttaaaacaattagtggtaaggcttatggcattattgaagaagctttagatgtgaagaatattggaagggttaaattaattcacctaaatactggtcttgaaaacacactacataatgttcattatgttgcagatgctacgcaaaatctttttccaatcaaaaaggcaaccaaaactggtatatttcattttaatcagcacgggtctgctggtcagttgcaagttggcttaaggttctccatatttttctggtggcttagcaagtataaatgttgtaaatggtaaatcaaggcatgctgactcttgtgtctcagttctgctgttcataaagtaggtggtttaaaaaatagtagggataattcttatggaatttaagattctcttttccattagaagatgttgttcctagtggatactcttactcttacctctattgttgatgagcaatccaatctgaagtcagttgataatcagactaatggtaaaaatgaagaagtggtcgatgttaatgataaaaatccaattggtgtctgttttaacctgtgtgatattgttgagatggttaatctaaactcaaagtggggtaccttaccccgcatgttcatttccatgttgccgaagacggtcacccatcccttactcccgaagatggtcacactttaaataaaccccgctcggaggggttttgttcaaagaggggtaagcacttgcttttcatgttcattttgataactatataagggaacatgtattcccacttttattatttgtatttcctcttcttttctttatattatttattttacttttgtttatcttatttaaacaacaatacaattattattataactaatatggactttgcaaataggataacctcaattcaacagatattagcaaggtacacgaatctggtatgaaggagtgttataaaaaagacaccgtcattttaatattttttgcaaagaaaatgcagactttgaatttattagtgccattttttttcaatgacctataaagaaaaagatacgaacgtttgaaaaatccaaaaaatcaacttttaaggcctatcactcgataactaggtgtcagacaagaataaaagctacatttgttagtgaggaaattcctcaaggtgttattcaaaaaatataaaaaaaaacactgtgttttgttcagaatacagcgctttatttttcatattggaatgatactggactgaagcaaaaataaaatcatttaatacaagatgagaaatttattacaataatgtaaagtgcaaaaaaagtattggccatatgcttttaatcattctgtttttttacacagtagttatttttaatgtaaaattacaaatacattttcaattcaactgtaatttaattctttaatgactctactaagattggtaataccaaaaaatattttactcattgtatcccagtttttgactaataagattttacttttttgtgtttgttaaattatattttcaattgactttgtatctgtaaataaattaagttcatcttgaaaaataaattttaataaaaaaaccatggtggttttaataataattaatttcaatattagtagcagttaataattattttaatacagatttcttgtatacaaacttttcagtgatgaaagtttcagcaactttggatgaaaaatttaatatttttaacaataatttttttttctttatcaatgaaaaacgctattttgtaagcaactggtttgttttttaacttggtattttacagatcttttgatacattacaaccatagtaattgcaagaagatttcgaaagttttaatcatttcaagttggaaaacatggattaatagaattccaaagaggaaactgattccactgtttcgtctgaagatgaaaagatgaaaaatattaattgttacaaatgttcgcggcctccactagagaaacaaatgttctgatattgagaaaacctttgaagttgaagagaacatttcagttaatatgtttgagattttaaaacaagttgttttagcaacaacattttaccaagaaatgttttttccgtttccagattattaaaccaaatttaaaactactttcatttagtgagttgtcaagttaccaaaaattacaaagttgttatcagtgcacaacacaaaaacatgttgtattttgcaaaattaattttacttctaaggaagaggtccattcaataattaatttaaaacataactatattttcaataaagataatcagttacataaaaacaaggggtttggccacgcatctgaaaatctaattggtcgatatcaaatctaggaattcttcgttctatttatacttagaattatttgtaacgtttcttttttctgatttgtgagcaatacttaaatctaatcagttttcatggcttaacttaataatacaatattattatgtatcatttaattttgcttagaatttccaatctcaacaatttttgcttagattctttaaagtaaaaggtgaagcttccgataaagctgttgcaacaattaaaaatgttttgttaaaacaacaagataaaagtatttgctacattaggtcagatattgaattcaatataacgttaacacccataattatgtaaatgatcaaaagatagttaacattaaaaattgcattagttcatgaagataaagttgtttaaattttagcatttacaggattcaagaagtttaaacaagaaaagtggtataaaaataaaattatagaagacagaacaaaatatatgaatggtggaaatgatactggttttagttctcatacttgtatctatggcggtgaatcatctgatttatttatgagcccccttaggtaacataaataatataaagaaaatgagaagaaataaaaattaatgaaagtgggaatatatgttccgttattctgtttgtaaaatccattgctaaaatagataaaatataatttgtattgttatttaaataagataaacaaaagcaaaataaataatataaagaaaataagaggaaataaaaattataaaagtgggaatacatgttcctttatatagtaagattttcactttgaaaaacttcatttttcaaggtgagggttttaacttcttgatgagggtttctcttcttatggtgagggtttcaaattcttgttgagggtttcttcttctaaaggttttgattcttatagtcacgggttcgaatcctagtttagattaatatctcaacaccctaccataatctaaacttaaccaaaatgtgaaataggagtcataccaatcttacagttgaattttctaaacttcattctatccaaattctttgtaaacatatcagcagccatttcatctgttctaaccgattccaaattgaaaaccttgttacctaaatgttctctaataaaatggtgtttgatatcaatatgctttgtcctttgatgatggacaggatgacttgtaagcaatttgcaaccttcattatcttcaaaaattgtaggtggataattgaatttaagaccaacagttttaagcaattgaattaaccaaagtagttctttaactgtatcaccaagtgccatgtattcagcttcagtagatgataatgcaacagtaggttgtttcttagatttccaagtaatagcacagccagacatcataaatacatacccagtaattgattttctatcaaacttatcaccagcccaatctgaatcactaaaaccaatcaattgaaaattagatacctttttataaaccaaaccaaatgatacagtacctttaatataccttaagacatgtttagcagcagcaatatgattagctcttggatctttaatgaatcttgataatgtagaagcagcataggacaaatcaggacgacaagtgtgttagacttgttaactctctaggtatgacttacgtaataatatctaataataagatctactaaaggacgatttctctatatctatataagaatctatataagaagaactacataactattagttattcccacatattatatcctgtgggaatttgccctcttatacatatctcatgtaacgagttgccccgttacctatattatgatattattactatcaatatatcatttacttacgtaatatatcttacgtaattatattctatatttatatcattcctgacatctcggggggttggaaaaatgtcagtaaatttcaatttgcttagcatttgaatttctttcaatttatatttatattttagcaataagatattttataatttgtttaatctcatattggattaaatattttgtttataattcattcaatcaccatattaatcacatattggattaattattttatgatcgattaatcacatattggattatttatattgtttaatcacatattggattatttctattcagactcagtatattctaagcaaaaagtgttgtttatggatggatgttctaataattcatgaagtttagtgaatccaactgttttggttagcatatctgctgggttgattgcacctggtatatgttctatatcaaataaacccattttataataatttcttaacttgtggtatgtatttagtaataatttttccttgaaatcaggtcttctatgttgttctttaattgtttcgactactggcaaattgtcacaatatatagtaactattatattattatacccaaaatcatctagtgtagttttaatatcacatgcagcttcaacagcctctctaactgctaaaatttccgcttgaaaactgcagtctgcatgttgtactatcctataactttttgatttaatatacctctggtttaatactatgtaatatcccccttggcttgtatgaggtaagtgagatgcatctgtatacacgtcaagttttattggatcatcaattctaccttctatatttcttattagttctttatcttccctaatatatctataagatgatgttcttgttgtatatacatattttaaaacttgtagtgcttgataaaattgcatgattgtaggaaaactactatattgagctaacatatttgcatgaacttgaatatcaaacctacccttttgtgatatatatattaaaatacccactaatttttgatacattcttaaactaaataattcatgcgggaagtgtggatgttgttcgtagaatgattcataatttgtcgaattatgtttttctaatactagttgttcaagtttttcatatttttctttatcgtttttaatccctttgatttctttaagttttttcatcaattccacttttaactcaacacttttttcattaggtgatataagtgattcaatatcgatatcatctatatctaactttggatattccatttccatattcacattttcatcatctcttctattacctatttcataaagatttttcaaaatatttttttctgcttgtggtatctcaccatcaataagatcaatgtttcctatttttctagttggaagctttatgaatgttatcatttcttctggtaaatcattaattgctttttcaatatatgtattcagacttaaaattaacatattattaacctttgcaatatcataacctaaataatattcagggtctcttgttatttttaatgcaaagttgtctaataataatttttctaatttttttgcacagtgtaatagtaacattatatcatcaacatgttccacaataaatgttttataatcaatcgacctatgtagacattcgtcggttataacatcttttactattgagtgtagtacgcttactaatttgtcatggaatgcttttggtgatgtatttaacccatatgcatgtttttctaatttaactaactttgttgtaaaacaatcttcaaaaccttgtggtgtatctaaataataataatgttttggatcaatttctgcatgtaaaaaagctgttgatatatcatatgttgtaatatctgttgttttatcaattgcatattgactaaacattaaaaaacatgactcttgtcttgccaccggactacttgcctctttatttttctttccaacccaatctctatgaattgttatcaatctggattttggtgtcattaatggaggttttaatgagaataaccaaaaagtatgcatttttaaactatgcttaggaagcttttttctttcattaattttactaaacacattcaattttatgaaacctgccatttctttttccacagatggtttccataagggatcattttttgctgcatagacatttgatggtattttaatatttttctttattgctgtaattttttgatagaataattgtggaacaaatatcaattcctcatttgcttgtctaattggtttatttctatgtaactcaaaactttttaatactctatagctagtgattaactgtgttttatgttttttgttatttatcttcaatttataatccatatcatatcctataaaatacccttcttctgcttttgaattatcatcaggagtcgtgtaaaacacaacatcttctaagaatagtggcaattcaggtaatgcatatcctgttccaaaaaacaatcttgctggttgtgattctagatattgctctcttttatatgattcattattttttctttcaaaatatctgcctgctggttggtcatatttaatactagaatgtggcaaatgattatatatcattgttgcatattggaaggattctctaataaaacgtttctccgactaccagtaggagccaaatccatatgtggttcaattagtacttccattgatttgtttccatatatgtttgttgtataagctaatttataaaattctgagcctttatctgttgttattctttctggttgtcttttatatgttgtatgctgttcttgaagccacttgtttaatatatctttaatatcatgtttatttgatgttgttgccgaatacatgaatttgctatattgatccacgacaattaccacataccatttgtgttttcctctgataaatggaccagcagtatccacatgaatttgttgaaatacttcatcaatgtttctctcttttcttcctgttgtagatttcattttatgttttgtagcaatacacgtaagacaattttttacttgaaactgatcttccttttttatagggatttttaattcttttaaattttttaagctgatatgtccaaaagcacaatgtaatcttaaaattggactagctggagccgttttcatttccaatttcaaaagttttgtatcaaccatcattaagttcacagcttttttatgtgtagtatttcctataaacaccattttttgttgatttttgtttatttgtttttccatctttaatttgtacaatccatttttttcttctatttcaataatataatttttccaatcttttgataattttttaagccattttttcacttcacctgaatattctattctaggttttaacaacaaaaactttccttttgtaataattgctgtgtatccaatatttgtaagctgtgatacacttaatatatttggtgcatctccttttaattccaaacagtctatttgttcattttcaattagcaaatttcctcttgtagttagcaatttttgttttgttccatctgctaattttatttcattgattgatcttttatttttttcatttttagctaattttgttgttgatatattactaccagtatctaaaatgtattctaaaacattttcatttttcgatatagctttattattaattgcaatattattttctaagttatataaagctatatctcttaattgctatttatgatttaatgatttagaattgttagcagtacctttgatattccaattctttgatttatttaattctttctctcttaatgaatctaaagctttcatcctgccaaaaaaaggtttcatattctgccaaataactctttctttgtcaaacatatgactattatcaggatgttcaccaccacattttggacaataatctaaattctttgtacaaatgaacgcaccttgaggtaattttggatataaatctgtaccatctcttggtaaccattcataattttcgattgcttaatttcgactgcttttttataagatgatgtattttctgttgttacttgtttttccttaatacttttttcaatcaatcttcttttcttataatcttctgatttgccatcataaaaattttcattttcttcgacatctataattttcttcattaaatcatcttttatttgaagttttgctatttcttccataacttttatcatgcttaattcagtatcattttttaatgcttcattaaattcttttgtaactatttttttaatagttgctatttggttctcatgaaaaaaaggcataatttcttcataaatagatgctgctgtttgaatcaattgctcttttctggtagcattaatatatttgttccatctattagtcacccaatcttgaatgtctttaaataaccaaacttctccttctaactttctttttttaatatttttgaatcttaaagaatcaattatatcaaataattggctatctgaatcaaataattcattggattttgcatgtttaataacatataatttatgaagtactccaacatgtgagtattccatttccatatcgctatcccataaatcagtaactcttttaacaatctcattattttttcctccttccaatgtattaactactgattcatacctatcatgaatttgaaattttgataacacttcacttaacttatattcagctaacttgatcatattaaatttgacatttttttttgtaatttctttatcaaaatcatcaacaattttaattttttctattttataacctttactgtataagttttgtatatccttgttttttagaattttaccaataataattcctcctgttgaatcatatggtgtattatcaagaataaatttctcgactcgtttgtaccatgattctactgtttcagatttatttggatttttttcatcagtcaactccttgatagaatcgaatatttttcctttccatgattccaataaatctttgaatatcttctcctctgaattattacttgtcatatttagaactgcttttaacctgttagacttgttaactctctaggtatgacttacgtaataatatctaataataagatctactaaaggacgatttctctatgttgagatggttaatctaaactcaaagtggggcaccttaccccgcatgttcatttccatgttgccgaagacggtcacacatcccttactcccgaagatggtcacactttatataaaccccgctcggaggggttttgttcaaagaggggtaagcacttgcttttcatgttcattttgataactatataagggaacatgtattcccatttttattatttgtatttcctcttcttttctttatattatttattttacttttgtttatcttatttaaataacaatacaaattatattttatctatattagcaatggattttacaaataggatggttgacaagttaactaaatcatcctctatgccacttgacaaaggactattatttttaaagaccatgagatctcaatttactcatggcatgaccattgatcacttgttaggtcttttatatcttcaaatgtttcgtgatccctcggtcaattcaagaattttagatgctgctgatcctcaaattagtttatcagctattgaagcatctcttaaggatattgctacctcttcatctccaaatggtgctccttctgctcaagcttttgttgctaacaagcctaaatctagaaacagaaaaccaaagaattcaaaagatgttatttgcagaagatgtcaacaatctggtcatatttctccaaattgtactgctgctgttcctgtttccactaagccaactaacaatggtaataattctgaaggttctactaatgatgttgcttggcatgtttctccaccagttgttaatgctggtgatacttatactcttgattctggtgctaatcttcatatgactaagaactttgaacattttagtgattatgtttcagctacttctattgaaactgtttctggtatttctggtgataatttacaaattatgggtagaggcactgtcattttcaatggtaataataatggccaaagaatttcaatcagtaatgttgcttatgttccaaatacttccagaaatttgatttccattaaagcaattactaggaaaactggttcaagaatttattttgatgaaggttattgttatatgcaagatggctcagttattggtaagtatttttcaaatactttgtatcaatttattttcttaccaattatctctgaaaattattgtttaattgcaaatactttgaacatgcattccagattgggccacccatctggtagggttatgagggaattaggttatactccttcctctgaatttaaaatttgtgaacactgttctgctggtaaaatgactaaggttcttccaaaatcatctacttttaaagcaattcatcctcttcaattaattcattctgatgtttgtggtcccattaatgttcctgggttatctggtgaaagatattttttaacaattgttgacgatttttccagatggtgttcaattttacctttggcaaccaaatctgcagcttctactgctattaaacaatttattaatttttctgaaactcaattttcatccaaaggctataaagttggtattcttagaactgataatggtactgaattttgcaacaatgatttaaaacactatttacaagataaaggtattactcatcaacttactgttccatacaattcatctcaaaatggtgttgctgaaagaaaacatcgtactgttcaagaaaaagcaagaactctcctttctgaatctggtttacaatttaatttttggtctgaagctattaaaactgctgagtttattatcaatagatatccatctgatgttctcaatggtaagactgcttacgaattatggatgggtagggttcctaattattcaatttttcattcttttggttgcaaatgcatggtattaattccaaaggaaaagagggaaaacattttttcaccggtctcagttgctggtatttttgttggatatagtccagcacataaagcttatagggtttttattcctaggattcaagatgttgttgtttcaaataatgtcaaatttgatgattcctattttccaatgttagactctaaaaacaatattcctattatggaggacgtttctccttcagatattttctatggtggtaatgctggtggtgttcctgttattccatctggtgcttctaattctgctgaacctcttattattaatcattcaccggttcaatccccagcaccttcttcaccagcaccttcctcctcatccacttcggatgctcattcaactacttcatcatcaccatcatctccagcttcattatcaagctcttcatcatcatcaccatcatctccagcttcattatcatcaccatcatcatcatcatcatcatcatctgctccagtatctgcttcttcttcacctatgatgcaatcttctggggttgttccagataatactgaaatggttcctaactctcctagtgttcctgaaactgttgcctctgttccaatttctgatgctattgaaaatattatttcacaagaagataatgatgtttccaaattttttcctgatgaagacaaattagtttcatctggtgatgaagaagaaattgattctattcctaatgattttgcttatccagtttatgatgaagttcatcaagttcctattgaaccatctttacttccattacgtcgttacagaagtgataccacttcagcatctattactcaacctccactgcaaaagccatgtttcaaaccagaaacacttgcttcatcatctacatcatctactacaccatcatctaccacttcatcaccagcacttgctccagctcaaccacctgctattgttccaatgcaaaggtccttgtctcagctctctaatattgttgattcagttcctaagcgttccaaagcattatttttaggttccaatgccattcatactgctttttctgcatctactactgtttcatctgctttaccaactacttttaatcaggctgttaattcacatgacagatccttttggttatctgctatccaaactgaattagatgctcatcaattgaatactacttggtctttggttcctcttcctgctggtcgtcgtgctattggttgtcgctgggttttcactattaaagattcaacatcaccacctacttacaaagctagattagttgctcaaggttttaggcaagtttatggtttagattattttgaaacattttccccagttgtcaggtatgaaagtattagaattgttcttgctatctcagctcaatttgacttaaagatccatcaaatggatgtttcaactgcatttttgaatggtactttgaatgaagaaatttatatgatggttcctgatggtgttgatgctccttctggtatggtttgcaagcttaacaagagtctttatggtttaaaacaagctcctttttgttggaatcaagctatcaatcaagttttattatctgctgactttcaaaggtgttcaaatgaatatggtatttatactaaggtgttttccggctctattgttattgttgctctttatgttgatgatttattaatttgttcaaataatcctgctgctatttctgatgttaaaggtcttctctcttctcattataagatgaaagatcttggtgttgcttctaggtttcttggtatgaatttacatcaatctgaaggaagtgttggtttatctttaaatcactatctcaatgattatttggttgattttaatatgcaagattgcaatcctgtttctactccatttgctgctggtactgattttttgcctggtgatgctatttctgatgctgatgttacccgttttcgcagcatggtagggaagttattatttgctgctaacacttgtcgtcctgatttgtcctatgctgcttctacattatcaagattcattaaagatccaagagctaatcatattgctgctgctaaacatgttttaaggtatattaaaggtactgtgtcatttggtttggtttataagaaggtatctaattttcaattgattggttttagtgattcagattgggctggtgataagtttgatagaaagtcaattactgggtatgtatttatgatgtctggctgtgctattacttggaagtctaagaaacaacctactactgcattatcatctactgaagctgaatacatggcacttggtgatacagttaaagaacttctttggttaattcaattgcttaaaactgttggtcttaaatttaattatccacctacaatttttgaagataatgaaggttgcaagttgcttacaagtcatcctgtccatcatcaaaggacaaagcatattgatatcaaacaccattttattagagaacatttaggtaacaaggttttcaatttggaatcggttagaacagatgaaatggctgctgatatgtttacaaagaatttgaatagaatgaagtttagaaaattcaactgtaagattggtatgactcctatttcacattttggttaagtttagattatggtagggtgttgagatggttaatctaaactcaaagtggggcaccttaccccgcatgttcatttccatgttgccgaagacggtcacacatcccttactcccgaagatggtcacactttatataaaccccgctcggaggggttttgttcaaagaggggtaagcacttgcttttcatgttcattttgataactatataagggaacatgtattcccatttttattatttgtatttcctcttcttttctttatattatttattttacttttgtttatcttatttaaataacaatacaaattatattttatctatattagcaatggattttacaaataggataacctcaattcaacactctatatctatataagaatctatataagaagaactacataactattagttattcccacatattatatcctgtgggaatttgccctcttatacatatctcatgtaacgagttgccccgttacctatattatgatattattactatcaatatatcatttacttacgtaatatatcttacgtaattatattctatatttatatcattcctgacaaagtgttagcagcaaataataacttccctaccatgctgcgaaaacgggtaacatcagcatcagaaatagcatcaccaggcaaaaaatcagtaccagcagcaaatggagtagaaacaggattgcaatcttgcatattaaaatcaaccaaataatcattgagatagtgatttaaagataaaccaacacttccttcagattgatgtaaattcataccaagaaacctagaagcaacaccaagatctttcatcttataatgagaagagagaagacctttaacatcagaaatagcagcaggattatttgaacaaattaataaatcatcaacataaagagcaacaataacaatagagccggaaaacaccttagtataaataccatattcatttgaacacctttgaaagtcagcagataataaaacttgattgatagcttgattccaacaaaaaggagcttgttttaaaccataaagactcttgttaagcttgcaaaccataccagaaggagcatcaacaccatcaggaaccatcatataaatttcttcattcaaagtaccattcaaaaatgcagttgaaacatccatttgatggatctttaagtcaaattgagctgagatagcaagaacaattctaatactttcatacctgacaactggggaaaatgtttcaaaataatctaaaccataaacttgcctaaaaccttgagcaactaatctagctttgtaagtaggtggtgatgttgaatctttaatagtaaaaacccagcgacaaccaatagcacgacgaccagcaggaagagaaaccaaagaccaagtggtattcaattgatgagcatctaattcagtttggatagcagataaccaaaaggatctctgatgtgaattaacagcctgattatgttgagatggttaatctaaactcaatgtggggtaccttaccccgcatgttcatttccatgttgccgaagacggtcacatatcccttactcccgaagatggtcacacttcaaataaaccccgctcggagggggttttgttcaaagaggggtaagcacttgcttttcatgttcattttgataactatataagggaacatgtattcccacttttattatttgtatttcctcttcttttctttatattatttattttacttttgtttatcttatttaaataacaatacaattattattataactaatatggactttgcaaataggataacctcaatacaacagattaaaagtagttggtaaagcagatgaaacagtagtagatgcagaaaaagcagtatgaatggcattggaacctaaaaataatgctttggaacgcttgggaactgaatcaacaatatcagagagctaagacaaggacctttgcattggaacaatagcagatggctgaactggagcaaggactggcgatgaagtggtagatgatggtgtagtagatagtgtagatgatgatgtagatgatgatgtagatgatgatgtagatgatgaagcaagtgtttttgatttgaaacatggtttttgctgtggaggttgagtaatggatgctgaagtggtatcacttctgtaacgacgtaatggaagtaaagatgattcaataggaacttgatgaacttcatcataaactggataagcaaagtcattaggaatagaatcaatttcttcttcatcaccagatgaaactaatttgtcttcatcaggaaaaaaattggaagtaccattatcttcttatgaaataatattatcaatagcattagaaattggaacagaagccacagtttcaggaacactaggagagttaagagccatttcaatattatctggaacaacaccaggagattgcatcataggtgaagaaaaagcaaaaactggagcagatgatgatgatgatgatgatgataaagtagttgagtgagcatccgaagtggatgggaaggaaggtgctggtgaaggtgctggagattgaaccggtgaatgatcaaaaataagaggttcagcagaattagaagcaccaggtgaaataacaggaacacaccaccagcattagccaccatagaaaatatctgaaggagaaacgtcctccatgataggaatatcgtttttagagtttaacattgggaaataggaatcatcaactttacattattcaaaacaacaacatcttgaatcctaggaataaaaaccctataagctttatgtgctggactatatccaacaaaaataccagcaactgagaccggtgaaaaaatgttttccctcttttcctttggaattaataccatgcatttgcaaccaaaagaatgaaaaattgaataattaggaaccctgcccatccataattcgtaagcagtcttaccattgagaacatcagatggatatctattaataattcaaactgtgatttgtcagaatgattggtgaaaaaataaattgatacaaagtattttgttgagattggtaattctaagcgaaactcaataatacataataatattgtattattaagttgagccttgaaaactgtttagaattaagtattgcttgcaaatcagaaaaaagaaacgttataaatcataaaaagaaacgttacaaattagaaaaagaaacgatagtaaagattggaattcttagtataaatacaacgaagaattccaaggtttagtaacgttccttttaagaagttctttagttagttttgtatttaatttattcatttatatttttagttcctttaaataactttcactgttgtcataaaatggaccctgcatctagagttattagattacaacaggttatgagtcaaatatcgactctatttccaaaggatagtacctctaaactatctgctgctgtaaactatccaaaatgggaaaactatgttggtagaatgttggccactgttggtgcaggtgttgatgtctattttgcttcaggagatttgatgttaactcctgatactactgatgtcctaagtgcacaaattcaaggtattctcaccttaattgttcaatcaattttgcactgtactgttgctccagctatccttgataagtttgaaacggatgctgctgttggttttgatttattagtgttaattagaagaagatattcacatatctctgttagagaactatccaatttggtcgactctgctgttgatgccagaaataaaggtacttctcctggtgaagctttagctattttcaaaaatgtctgctatcaatttaataatactcctgaaattaatcaaatgatggggttattttacttaaaaatgttcaactcaccattagctaaagctaaagttttagattgtgctgcacctgatttatcattatcagctgttgaagtggcacttgaagattttagtccaactgttccttaaacttttatggttaagaacaataaaaccaaatttaagagaaactttaaaagaactccaaatgaaattacatgtctcagatgtcaagttcctggtcattatgctagagattgtactgctcctgctcctgcttttgcatctaatgctccgaaacaaggtggatcagcattcactactaccacttcaaatggttttgcatggatggcttcaaatgttaaggtgcctttgtcaagaaaatatttgttagattctggatccaatattcatattgctgttcacaaagaccaatttgttgattttagaattattagtggtaaagtttctggtattgctgaagaacccttagatgttgaagggattggtacagtcaagttagttcatccatctactggccatgaaatcactttaaatgaggttcattatgttcctgatggtactcaaaatattttatcagtaaagaaagcatctaagtttggtgtttttcaattttctgaacataaagttcattttattccacatggatttgattctaaattacaaattggttctaccgaaggttcgttgtatttctctgattatgttccatctgttgctcaaacttttgctgtcaagtcggtcaatgttgaattaatgcattctaaattaggtcatccttctcctgaaaccttaaaattattaggttattcaggtggtccatctgttgaaaagtgtgtgtcatgtgcagctggtaagatgacaaaagtttatcctaaactatcaactactcctccagctagtgctccacttcaattaattcatgctgatgtttgtggttcatttccagttaaaggcactaatgatgaaaaatttttcttaactattgttgatgattattcaagatggactcatgtcattccaattcaaaagaaatcagatactgttcagttgatcaaatcatttattcaaactgctgaaaatttatttgcctctaaaagattcaaagctgcaattttgagaacagacaatggtggtgaattctgtaatgatgaaatggatgcttattgtgctgaaaagggaaaatgactgtttcttataattcatctcaaaatggtgttgtaatttttggtctgaagctgttaaaactgcggaatatttaatcaacagatatcctgctgataatcttaatggtaaatctccttttgaaagatggtatgggtataaaccaaattatgatattattcatccttttggtgttgcttgttatgttttggttccacctgagaaaagaacatcttcattttctcctgtttctgtttctggcgttttagttggttttagttccctttataaagcttataggtatttcattccttcactcaatgatgtcgttttttccaataatgttaagtttaatgataaactatttccatataagaaatctacagatttgcctatttctcatatgttacctccctctgatgttaattttggtgctaaaactggtggtgctgttcttcctatagttgttgatatttctgttgttgatactgattctagctatgttccatctgatgatcctaatactacttcaaaatcaactagatggaatacatccgaacttagatcatcgcctttgttagagaatgttgcctctgaggaatccattgtctctgttcaatctacatcacctactgtttctccaacaactgaattaactactgttgtttctgattgtactcaatgctaattcttcaaatgatgatcttaatatctcgaatgaacttcaacatgaaaactcaattaaaattcaaaatgaaaatgctgctccatctgctgttccatctgctgctccatctgccgctccatctgttgttccggaattaggttttgatcaagcagaggttgatcttggttatatcgatgatatttgttctgaaattgctgacaatcttccaatcgatgctgaattacaagtagatttagacttgattaatcaacttactgatgctgataattcctcttctccgttggtaagatcaatttctgctgttactgatactgaaggtccacctcccaaaagggttgaaaaatttcttggtgctattttcaaggtcattaaagatgcttctataccatcagctttaaattcaattcctaccactttcaagcaagccatgaattcacctgatgtcaaattttgggaagttgctattaaaaaggaattagaggcacataaagaaaatcatacatgggatatagttgaactgccttcacatagaagaacaattggatgtagttgggtgtttaatatcaaagataatactaatccaccaacttttaaagcacggttagtagctcaaggatttagacaagttcaagaaattgattatggtgaaacttttagtcctgtggttagatatgaaagtattagaaccttatttgctattgctgcacaattcaaattggtggtacatcaaatggatgttacaacagcctttcttaatggtgatcttgaagaagaaatttatatgaaggttccagatggtgttaatgctccagaaaacatggtatgtcgtcttcgtaagagcctttatggtttgaaacaggctcctctctgttggaatatgaaaattaacaatgtaatgctatctgcaggttttaaacggtcattatctgaatttagtttatattccaagattgtcaatgatgaagttattttagttgcactatatgttgatgatttattaattttgtctaataatatggccctaattgatcaagtcaaattgttgttgaattcaagttttaaaatgaaggatttgggtttggttaatacgtttttgggtatggaaatttcacagagttcgaatggtatatccctacctacatcttaataaatatttaaacaatatgttacaagattttggtatgactgaatgtaatgctgtttctacaccacttccttcaaatgttgattctattgatgatggttctaaactttcagaatctgatgctacagtattccgcagcatggtagggaagttgttgtttgctgctaatacagttagaacagatttatcatatgctgcctcatacttatcaagatttattaaagatccatatactaaacatttaattgcatgtaaacatacattaagatacattaaaggtacaaccaaattaggcttgatgttcaatgaaattactgattttgaattagtaggttattgtgatgcagattgggctggtgataaagctgatagaaagtctatgacagggtatatttttaagttaggtaattcaattattacttggaagtgcaagaaacaacaaactattgctttatcatccacagaagctgaatatatggccttaagtgatgctgttaaggaaatgttgtggattagacaattattgaaaggattaggtttaaaatgtggtacagcatcaactatatatgaagataatgaaggctgtaagttgttgtcagaacatcctgttcatcatcaaaggaccaaacatatagacattagacatcattttatcagagatcatattcaaaagaaagatgttcaaatcaaatcaattagtacaaattatatgattgctgatatgttaacaaaaagcttgaatagaattaaattcaatgaaatggttgagatgtgttgtattgaggttatcctatttgcaaagtccatattagttataataataattgtattgttatttaaataaaataaacaaaagtaaaataaataatataaagaaaagaaaagaaaatacaaataataaaagtgggaatacatgttcccttatatagttatcaaaatgaacatgaaaagcaagtgcttacccctctttgaacaaaacccctccgagcggggtttatttaaagtgtgaccatcttcgggagtaagggatgtgtgaccgtcttcggcaacatggaaatgaacatgcggggtaaggtaccccactttgagtttagattaaccatctcaacatttactgtcaaatttaattaagttagtacgaactaagtaagtatgtattttgtgttatatatcaatacatgtacaagttggctatctaaatgccactgatttctttaggtttttaaacaattatttttattttatcaagcatgacaaaaacttctatcgatccaggttttttatcaaacttttcctcacccatttgattgcgtttcttggttgtatctgtcaccattgtcaccaacatcatcaacatcattttcattgtcgtcattttcttcataaccacatcggaaacgttttttattgtcgccaaaaaaaactcttttatatttatggaaagccgtatgttcatggttacaggatatatatttaaaaacctcggaataatgcattcaatacaaggttttggacctcctgtcgtgattgactttctcttagaaatcttaagcaaattatcagcagttttcgcgtcaattaccagacactgttatatcatgtttttcaaaaattggtttaagcttggtcaatagtttattgtgggtttcattccaaagtaagagtattttgcattcatagctgtatagccttcttgtaaatttaattctactctaccaaataagtcccattttctccttgaaatgtaaagcttatttgtaaagaagccactatattttataaaatctaatactttcttttatgcaattgaaaccaactttttcccctttttatttttcgatcttttgatcatagccgtatgaaagatttcaattttactcttttttaacttctccatcgattcatcaatctttccgtcaccaatacacaacagaaacaaaaatattaaaaaaatgtactctagaaaattaattcatcgcatcaatagcaccataggcagctaataagtctagatgtttttaaatattcagagtttttaagccaaccacaatttacaacattgacattgttgttaaaagcttctttaataccagccatctctgcttttgattcatcagtgaaaaaattctgactgaaaagtttccaacccagatattatatgaaaacatactggcaattctgatatatttgtattaacttttatttctcctttgtttttctttcataagctcaagtaacttcttaaaaaattggctgtagattacacgattgttccgaccactgacttcttttttgatagatactgtagtgaatttgatatttctattttttatgcatgcagaaggtgcatctaaactccaccacatgtcattcgcaagtactcctaagcttttatctgaagaaaatataagagctatgtcagtgtcacaagactcggaatagctgaatgaactaaccgcactgccctttctcatatctgttaactgacattgactatgtactctattgataaccttttcaacagccaaagcttttccatattcattaatacagacattataatctacccatttcacaccatccaaagcagtatcagattttttaaattcttcttatagccttaaaatgaacaagagttttttcaggaaaaggaccaatttcatagattactgccatgcttctgaaatatttttttttaattacattaatattttaacttctatgcttgtaattattaacagcaatatttttataggaacgatatccaatttctttatttctctgagaacatccttcaacatagtctctcaaagccttcataattaccaacctataaaaacaatcaaacgcaatagtaatttttctatcgcaaccttcacataaatggcgacaagcttttgtttgaattgtaacaaaacttaagaatgattgtaggatgtaaggtcttttaacattttttatttccattaaaaatccacttgtctcttgcatttgagagaagcttagggcacaatatttcccggaaaccattctattgattttagttgcttgttcatacctttactttagcagttcgggtggggtaataaaattgtgttcgaaaattgttctatgagcttcaaaaaggccttaagtttgattttgtcgtttttgcacgtcaattcaatattctttatctttacaacttttatgttgagtaattgaaggggcaaatattatttcaacttttttaaaatctatccatgttcaagcggatatttgatgcaactaaaaaaaggcattacgttgttccgctggataaaaactacagcttccaatactcaggcaacagtcattaaactgatcagccaccgcttcagaggggataaagtcatgaaaataagtaccaccgttatttgcaaacttttagcgtattatttctctttccttgattattgctttcaatacaggttggctctcttgttttaagttgaatgtcatgtgtgcttccttgaacaaaagtgtgtgtttttctttatttatctttggtataatttttctgattaagttcatcctcaattgttccggatcaatttccagtttctccctagtgaacacgatatcaaaatcagaaataaggaataatcttgcaaggtattcctttgtcaaaaaattccatgagttcaggtctttccattcctcagtaagtgttttgattgacaaaagtagtgatgaattaatgaaaagtttaggcattgaatagttgcaagtaacaggaaacactatatgtaagtttagtgtaaagccaagaataagaagaaagagaagaaagaaaataatcactgtatgaaagacagcggtttcagacataaaaacaattatgtaagcattaaaaacttgctgttctgtaactttctcgctcagtagtatatttcttgtcaagatacaaatgttttgttgttagtataaataggtgaaataatgccatttatacaaaagtctaaaccatatgatattagtaataattaagactactaaagtaactaactatgggtactgacactagggcagttgcctttaaaaatttcttacgagaaaactgattctccatttcaacatttgaaaaatatatgtatgtacaatttttaattgaatcatattcctttttagagtaagcttcataagctttattatttttatttttaacagcatcttgaatattagcaactgcggctgaatcattaatatgtgattcaccaccatctatccaatgatattccccagattcaggtagttcctttggtttaatagtttctctatttggataacccatttcatgtaatgaaaatgcatcttgtgcaatatactcaaatataacacccttaattctaggtgcctgcaaaacatttatcaataacagaattatcaacacctgaagcttcaaaaatttgagcaccttcatgatgctaaagttgaaacacccattttagacataactttaagaatgccatcatcaattgcatgtccataatttttaataatttttctattggtgaattctttggttaataatttgtcattattcaatttaataagtgaatcctattattaagttgagctttggaaactgattagatttaagtattgcttgcatatcagaagaagaaacgtttatgaaacattataaatcagaaaaagaaacgagagcattagtgttatgaagccgaaaagtaaagcaagtaatgtcagggcgtacatacgacactgcccgtaaagtccatatctcaggctagggaattgccatgagcgaggtattggacgtcgagtgttgttgactacaaccgacacacatattttatactatactctttatactcctatataacatcttaatagacaagcccttagcgccgtaacaagtaaaatgaaacgaattagaaaaagaaaccgacagttaacgttggaattctaagtataatgtagaacgaagaattcccaagtttaataacaagtctgttgatattttgtacaatctaagttattttatagtttaaatagtttcttcttttaatactgttatagtggaaaaatatggatcctgcccaaagagtcgttagattacaacacgcatttattgttcaagtcagtatatctttgcccatactaaactaaatttataaatttttaccttcatttcattaaaatatacaattttatacatgcaatctaatgactctttgagcaggatccatatttatgacaacaacagttattaaaagaataaactatataatataaataaatataaaaacaacataagaaaaacaacataaaaaaaatattaacaaaccttggaattctttgtggtacttatactaagaattccaacgttgactaataatttcttttctgatttgcgagcaatactacattttgatttgttcttcgaggctcgacttaataatacaatattataatttattattcagtctcactcagaattaccaatcttaacaatctcaacaatacagattgattacttatatacatatatgttattcatgcttcatcaattcagtatatcttcatatattgaactgagtgtaaattatttctattggattattttcaatctttttcgcctggtttaattctaataagaactaaacttttcaaatttacacagctattatgtatctttaataaaatttttggtaaatttaaactctgaattgttttttttaattttgcagcattgcttgttgaaaaatataattagtttgattactagtttccgcgtgacgaacctaatcaactcttttgtcatttccccgggaaactgacgctcaaaaagttgggtttggtaatttcaatttccctacggtaaattatgacccctacttagtactacatatttatcttcaataacaagctaaatactcttttcacaaaatactttttataatactatatacacataaaacttcacttaaatagaacccaatgttgtatcaactgatgtgtcaaatgtgatggatgcaaacgttgaatcgtctgtattttcttcattattagcttcttgaacaagtctttcagtaacctgtgggcaaaccatgtttacaacctctcttctagcacgtcctcttctagtattaaaacagaatttaaagtttttcatgtcagtacatcgagataaaccaacataaagctggccatgagaaaaaacatcagctggtaaaaacaaacccacttttccagaaaacgtctgttcttgagacttcattattgtcatagcaaaacaaactctaattggaaattgttttctaatgaattcaactggcaacttagaatctgctttatgacgaaaaagaagccttggaagatccacctcattgccagcatgtttacccgttaggatacgacaagtaatccatttagcaacattttaatcatggatacgagttacgatcattcttgttccgttaaccaatccatctcctgcacttacatttcttaacaaaataactggacaaccgacttttaaacgaagttcattatctgggatactagcctctttataaaaaaatttacctggggtgtccattgactaataaactgagttgtagccccttcaattacttgttccgattttaagatctcaacagatgtaggaagtcgcccaagcacttttctattaacttcattaacagtaacgttttttggagtcaatacacaacttgaagcatacattctcatcagctcatctaatttcacagggtcgcctaaatgattgacattttgaaatatgttttgatcatacacttgtgttaaaaattgagatcaagcagacatgctgaagaattgagtcaaatcagcacctaacaaagacaggtcaacatgccctttaccattaaataggtctacaccggttccaattttgagtaatgcataggcttgtcgttgcttttcagcacgatcttctggtcgaactacaaacataattctcatattttcagttagtttcaaaaacttcacatcctgaatataaggtaaacacaaaaacgatctttcataaacatcaggcatacttggattatttagaaccacatataaacactgtctaaaatcacctgaaaagacaacaacacaaccgccaaatggaatatttctcttcttctcctcgcttaacaacttatctactgcgagaatcacagattttggagtcatagttatttcatcccatataatgatatcagcatctttaattatatttcgttgagttaaattttgagaacatgcaacgttgggcgaaggttgcccattcacttcatttgttatttgaatagcaaacatcttatgagctgttgttccagtttccatgagcaatgaagcaataccagtagaagcaacgggtaaaaccaccttgttattattttttcttaaactttttataataagaccaatgagaaaagttttgccactaccagctggggcatcgatgaaaaacaaattgctttgattcctgttaccatttaaaacactatcaacaatactatcaaaatgtgatctttgcttaattgttagcctttctacttgaacagcaatatcatgtgcagtggcttctgtagagttctataatatagtgaagagattccatcatccaaggtttcaggtaacaaaatagatgccattcttcctaaagttttgacacatctaacatactcttcatcagaaccaaccaagccaatgcgatacaagcttcctcatacgtaccatgaccgaccttcaaatcatcaaatgatgtaaatcctttcaccgaattcaacaacaaataaccaaagtatttatttttatcctttgcaagaggtgtgacaggaggaacaaatgctattgcatctgacgctcttaatctggcaacccattcattcttattcaaatcccaacggaagttttttatcgcttccttataaaggattttactgttcaagtctgatatatttgaaaaatatttatatattaaataaatcttttagattatcagcatcatatgcagcagcaatttcaggatcaacatcagacgaatcattgtgataagccaagtatgtgttaattcttttaatcaggcgaaaaaatcctagtaaagtacttttcgttctgttgtctttcagcagcttcttctggactcattccaaacagtgtattgtaccttattgaaaattcagcttcagtatgacaatgtagtgatataacagcaggttttataccatgcatatggagtgcagatagcatgtatgcaccttggatgccactcatgtatcttgattggataaactctttcattccatcaattctttcttcttctctattttcagtttctccatcaacatttgatcttctcatataagcaatatcgacacctttgttcatatatttgaaaagatatttcactactgcattactaccaacaacaccaagattagcatgacaattatactttgctaatattgtaggattgtaagagaccacatttttatcacctccacctcccggaggtaaaattctaccagcttcagctagcttaaaaccattgcgtaattcccatgaaaaagcaccttttttacaatttttaagattacctccattactttcacatcattgaactgtacatttatgaatcattgttttatcaaccatttctgcaactgttcttgaaacaggtctgcatctcttcacaattttatctaacttgttataatcaatttcgatgtcaccgtttggttgttctacttctaaatcaggacaacagattgtcatatgaatgtgaggaagacctctcttttgaaattctgtaatccaagcctttgcactaactttcatgccaagtaacttagaaatatctctatcaaattcagacacaatttgttggaaaccactagcaatcaattcatttctagattcattggaaacatggataaagggtaaagtatccatcagtttttttgccaaatccggattcattgtaatcgttaaaaataaatttggaggtccaacagatgaaaaaacatttgtagttttttgataacaccaactagaaaataaccttcagtcccaaaaattttatagggggcagttgtatcagaggtggatttgttgagatggttaatctaaactcaaagtggggtaccttaccccgcatgttcatttccatgttgccgaagacggtcacacatcccttactcccgaagatggtcacactttaaataaaccccgcttggaggggttttgttcaaagaggggtaagcacttgcttttcatgttcattttgataactatataagggaacatgtattcccacttttattatttgtatttcctcttcttttctttatattatttattttacttttgtttatcttatttaaataacaatacaaattatattttatctatattagcaatggattttacaaataggataacctcaattcaacaggattgacgagaaacgtttttattcatatcaattcttgtttttgatctgaatacacgctggttcattgaatgaaaacctaaatacttttgttccaccatcaattgaacggtggcaaaaaactcttcaacaacagatccaccaaaatagaattggattccagaccatctcttggtctttaagattctcatggacttttaataaaggatttttacatctgtattgtaaaatatgacgaagaaattctctcatactaaatttttttacttctattatcagaagtgccatctctcattctaatgtttggagcccaaccatcttcgccgtgtaaaaataaaacaggaaatctcaatggaagaaaacatggatgtgtaatattgataaatttggttataggttgattatttgcatctgtacctttaacactgaccataaacatatattcctcatcgtctgatttttgtccaaaagcaagcgaaacttctggagcagtgggaacatttgcaactctacgatcaagcaccttccagatttatataaaaacacactttcaaagttacgatttgaaggatctgattcaatgaattccattgcagttcggaataacttagcatatttaatattgtgtgccatataacgatgtaaaacagaaacaaaatgttttaaagtttcaatatctcttgaattgccatctcttaatgcttggtttgaaggatcatttctgcaaagaaaatactgaacaatatcaacatgacgttacctggattgatcgtcatcgcccattccccaaatttcagaaaatctacactcttccccatcggtacccaataagtccaccaacaacgacacgaagttcaccttgtatcaagatgatttttttccatttctagagtcattggcatttattttagttatattttgagagaaacataatattttgttgacagtcattgaatattttggccaaagtttatgcatgtatacagcaattacctcttcgtctgttggttttttcaaatattcaattggaagttgaacttaccacaacacccataaaatgttttattacgagtacggagtgccctgcaaaaatttgcatgtttgggaaaaacaaatactatctgggtctacctcatccattcggtacctgatttctggaataattagggtcaggtaaagtctctccaatggttggtcttcttcctctacttcttcttcctcttccacttcttctacctcttagacgtcttggtagtatgatgttttcaactgtaaaatttgtctcttcattagcagcatttggagttgaatcagttgtggaattgcttggttgttcatcatccgagtttctaacaacgttattcaaattagtttgtcgatcttcttcttctgcttcatcgtcagttatatcatctgcatatacaggtggatggatatcaattggttggtctgaatttgcaagcgcaatggcaattgtttcactcgtttgattatcatgttccagatggacatttttagtatcctatatcaaagttagtgttcggttcagtttttttaattcaattttattatatacattgttgtaatctgattactctagatgcagcgtccattattaacaacagtaaaagttattaaataaactaaattaaatataaataaatataaaataaataagaaaaacagcataaaagtaatattaacaaaccttgaaattttttgttttatttatactaagaattccaacgttgactaataatttcttttctgatttgcgagcaacactaaattttgattggttcttcgaggctcaacttaataatacaatattataatttattattcagtctcattcagaattaccaatctcaacaatctcaacaccctaccatggtcacaaatcaatcacatcttcaccattccagccatctcaaccatttcattaaatttaaccctatttaaacttttagttaacatatcagcaatcatataattggtactaatagacttaattcaacttctttattttgaatgtgatatctaataaaatgatgtctaatatcaatatgttttgctctttgatgatgaactggatgctcagataacagcttacaaccttcattatcttatatatagttgatgctgtaccacattttaaacctaatcctttcaataattgtctaatccacaacatttccttaacagcatcacttaaggccatatattcagcttctgttgaagataaagcaatagtttgttgctttttacatttccatgtaacaattgaattaccttttatcaccagcccaatctgcatcacaataacccactaattcaaacttattaccttcactgaatattaagcccaacttggttgtacctttaatatatcttaatgtatgtttgcaagcacttaaatgtttggagtatggttctttgataaatcttgataaatatgaagcagcaaatgctaaatctgttctcactgtattagcagcaaataacaactttcctaccatgctgcggaatactgtagcatcagattctgaaagttttaaaccatcatcaatagaattaacatttgaaagaagtggtgtagaaacagcattacattcattcatcccaaattcttgtaacatattgtttaaatatttgttaagacgtagagatataccttttgaattctgtgaattttccatgcccaaaaaggtattcaccaaacctaaatccttcattttaaaacttgagtttaacaacaatttaacttgattgataagtgccatgttattagataaaattagtaaatcatcaacatacaaagcaactaaaacaacttcagcattaactatttttgagtataaaccaaattcagataatgatcttttgaaaccagcagatagcatcacatcattaattttcatattccagcacaaaggagcttgtttgagaccatatagacttttacggagacgacaaaccatattgtctggagcatcaacaccatttcttcttgtaaatcaccattaaggaatgctgttgtaacatccatttcatgtaccgtcagtttgaattgtgcagcaatagcaaataaaatccgaatactttcataacgaaccacaggactaaaagtttcaccataatcaacaccttgaacttgtctaaagccttgggcaaccaaacgagctttaaacattggtacattaatattgtctttaatattaaagacccagcgacatccaattgctcgtttatgtgaaggtagttcaactatatcccatgtatgattttctttatgtgcttttaattcctttttaatagcaacttcccaaaatttaacatcaggtgaattcatggcttgcttgaaagtggtaggaattgaatttaaagctgatggcatagaagcatctttaatgaccttgaaaatagcaccaagaaatgtttcaactcttttgagaggtggaccttcagtatcagtaacagcagaaattgatcttaccaatggagaagaggaattatcagcatcagtaagttgattaatcaagtctaaatctacttgtaattcagaattgattggaagattatcagcaatttcagaataaatatcattgatataaccaagatcaacctctgcttgatcaaaacctaattccggaacagcagatggaacagcagatggagcaacattttcattttgaatttcaattgaattttcatgttgaagttcattcgagatatgaagatcatcatttgaagaattagcattgagtacaatcagaaacaacagtagttaatttagttgttggtgaaacagtaggtgatgtagattgaacagagacaatggattcctcagaggcaacagtctctaacaaaggtgacgatctaagttcggatgtattccatctagttgattttgaagtagtattaggatcatcagatggaacatagctagaatcagtatcaacaacagaaatatcaacaactataggaagaacagcaccaccagttttagcaccaaaattaacatcagagggaggtaacatatgagaaataggcaaatctgtagatttcttatatggaaatagtttatcattaaacttaacattattggaaaaaacgacatcattgagtgaaggaatgaaatacctataagctttataaagggaactaaaaccaactaaaacgccagaaacagaaacaggagaaaatgaagatattacgtaagtaaatgatatattgatagtaataatatcataatataggtaacggggcaactcgttacatgagatatgtataagagggcaaattcccacaggatataatatgtgggaataactaatagttatgtagttcttcttatatagattcttatagagatatagagaaatcgtcctttagtatatcttattattagattattacgtaattgtcatattcgcagaagtaacaagtataacaggttaaaagctagcttaaaaggacgatttctctatatctctataagaatctatataagaagaactacataactattagttattcccacatattatatcctgtgggaatttgccctcttatacatatctcatgtaacgagttgccccgttacctatattatgatattattactatcaatatatcatttacttacgtaatatatcttacgtaattatattctatatttatatcattcctgacatctcggggggttggaaaaatgtcagtaaatttcaatttgcttagcatttgaatttattttaatcttatattagattaatttattatatgatagcaattaatataataaccctatattggatttaattataaaaatttatttcagtcctatatcggactttctttatttctatttttataactaccctatattggacatagttatatttgattgaaatcctatatcggacttatttttttataatttaatcctatattggacatagttatatttgtttgaaatcctatatcggactttggttttataattaccctatattggacataattatatttgattgaaatgttttataactaccctatattggacataattatatttgattgaaatgttttataactaccctatattggacataattatattcaattgaaatcctatatcggactctttttatttttatagctaccctatattggacgtagttatgtttgaattgaaatcctatatatatcggatagagttttattagattatatttttttttttttttttttttttttttttttttttttttttttttttgataaatactttaggtcctatataaatacattggatacagttattgcaaatgtatagattattttatatgcaaattttcctcttattgtttcaagttttttgtatagcacaattcatcatgttttcaatatgatgttattacaatttttaaattgatttatcaaattcttcccttctaagtgagtctagttttttcattcttccaaaattatgttccatatttttccatactacttctccattctcaaacatatgcagatcttgcttatgttcacctccacattttttgcaatattccaagttttttgtacacttaaatgcaccttgtggtagttctggatataagtccgttccatctcttggtaaccagttataagtttcaatggcttcttcataagataatgtatctgctgttacttgttttttcttatcattattttcaatgaatctccttttcttaaaatcttctgattttccatcataaaagttttcattttcttcaacatcaattatttttttcattaattcattttgaattgaaagttttcctatttcttgtacgacttttatcatacttaactccgtatcattttttaatgcttcattaaactctcttgtaactactcttttgatcgtagatatttgatcctcatgaaaaaaaggcataatttcttcataaatatgtgtggcggttagtattagttgttgtttttttgtagcattaagatatacattccatctatttctcacccaatcattaagatctttaaatgaccaaacttctccttctggttttctttttttaatatttttaaatcttaaagactcaattattccaaatagttcactatctgcatcaaatagttcattagattttgcatgtttgatcacatatagtttatgaagtactccaacatgagaatattctatttccatatcttcatcccacatatcagtaacttttttcactatttcgttatttttaccaccttctaatgtatgtactgctgtttcatacctttcatgaatttgaaattttgataacacttcacttaaattatattcagctaatttgatcatattaaatttgacctgtttttttgtaatttccttatcgaaatcatcaaagatttttattttttcaatattaaaacctttactatttaagttttgtatatccttgttttttagaattttaccaatgataattccccctgttgaatcatatggtgtattatcaaggataaatttctcgacacgtttgtaccatgattctactgtttcagatttatttggatttttttcatcagtcaaatccttgatagaatcgaatatttttcctttccaggattctaataaacctttaaataccttttcatcaaaattattacttgtcattttttaagctagcttttaacctgttatacttgttacttctgcgaatatgacaattacgtaataatctaataataagatatactaaaggacgatttctctatgtgtatataagaatctatataagaagaactacataactattagttattcccacatattatatcctgtgggaatttgccctcttatacatatctcatgtaacgagttgccccgttacctatattatgatattattactatcaatataggtggaaccaaaacataacaagcaacaccaaaaggatgaataatatcataatttggtttatacccataccatctttcaaaaggagatttaccattaagattatcagcaggatatctgttgattaaatattccgcagttttaacagcttcagaccaaaaattacaacaccattttgagatgaattataagaaacagtcattttcccttttcagcacaataagcatccatttcatcattacagaattcaccaccattgtctgttctcaaaattgcagctttgaatcttttagaggcaaataaattttcagcagtttgaataaatgatttgatcaactgaacagtatctgatttcttttgaattggaatgacatgagtccatcttgaataatcatcaacaatagttaagaaaaatttttcatcattagtgcctttaactggaaatgaaccacaaacatcagcatgaattaattgaagtggagcactagctggaggagtagttgatagtttaggataaacttttgtcatcttaccagctgcacatgacacacacttttcaacagatggaccacctgaataacctaataattttaaggtttcaggagaaggatgacctaatttagagtgcattaattcaacattgaccgacttgacagcaaaagtctgagcaacagatggaacataatcagagaaatacaacgaaccttcggtagaaccaatttgtaatttagaatcaaatccatatggaataaaatgaactttatgttcagaaaattgaaaaacaccaaacttagatgctttctttactgataaaatattttgagtaccatcaggaacataatgaacctcatttaaagtaatttcatagccagtagatggataaactaacttgactgtaccaatcccttcaacatctaagggtgcttcagcaataccagaaactttaccactaataattctaaaatcaacaaattggtctttgtgaacagcaatatgaatattggatccagaatctaacaaacatttttttgacaaaggcaccttaacatttgaagccatccatgcaaaaccatttgaagtggtagtagtgaatgctgatccaccttgtttcggagcattagatgcaaaagcaggagcaggagcagtacaatctctagcataatgaccaggaacttgacatctgagacatgtaatttcatttggagttcttttaaagtttctcttaaatttgtttttattgttcttaaccataaaagtttgaggaacagttggactaaaatcttcaagtgccacttcaacagctgataatgataaatcaggtgcagcacaatctaaaactttagctttagctaatggtgagttgaacatttttaagtaaaataaccccatcatttgattaatttcaggagtattattaaattgataacagacctttttgaaaatagctaaagcttcaccaggagaagtacctttatttctggcatcaacagcagagtcgaccaaattggatagttctctaacagagatatgtgaatatcttcttctaattaacactaataaatcaaaaccaacagcagcatccgtttcaaacttatcaaggatagctggagcaacagtacagtgcaaaattgattgaacaattaaggtgagaataccttgaatttgtgcacttaagacatcagtagtatcaggagttaacatcaaatctcctgaagcaaaataaacaccaacacctgcaccaacagtggccaatattctaccaacatatttttctcattttgaatagtttacagcagcagatagtttagaggtactatcctttggaaatagagtcgagatttgactcataacctgttgtaatctaataactctagatgcagggtccattttatgacaacagtaaaagttatttaaaggaactaaataaaatataaataaataaattaaatacaaaactaactaaagaacttcttaaaaggaacgttactaaacctaggaattcttcgttgtattaatactaagaattccaatctttactatcgtttctttttctgatttttgaacaatacttatatctaatcagttttcaaagctctacttaatagtacaatattattatgtattatttagttttgcttagaattaccaatctcaacacaatggaatcccagtttgatttctttgtctactcctatccaatcgattcgattagtttgattatttaaaattacgtaattaagtattacttataattgtagaaaaattatttaaatataaaagctcttatggccaagttggtaaggcgctacactagtaatgtagcgatcctcagttcgactctgagtgagagcattattttttatgtttccttaaagaaggttactttgttaatgttcttaaagataatattttaattttttttaaaaagctacaacctatatataacctgtttcttgctctcaaagggacctttgtcaaataaatccagtaaaatattgggtgtaactctaaataatactctctgagaagatttatatgggtcttaaatccgtgtgaattcatagttttcacagaatcgataatgcactcgatttatgtgtaacagcattcacgtatgtattaccgataaaggtccaatgcaaagcattgactttatactgaggtatattccaacgggagtacttccaatcaaaaaacaaaccagagttttttaaaaagacacaattcacttttctttttaacaaaaaagtaaaatcaaattgatattttataatcaagtggaatatatttgttgctaagtaaattggattccctattaatttatcaaataaactggtcaataattataccaataaatgtaattagtttttttaacttaccacatacactacttttttttttgaagattgtttcaaatagtatttttgtcttgttaaccagtgcttaaatttttcaaaaataagaatacttcacttaataaatccattatgttgttttttctatgattctgttgagattgttgagattggtaattctgagtgagactgaataataaacagtaagactgtattattaagttgagcctcgaagaaccaatcaaaattcagtgttgctcgcaaatcagaaaagaaattattagtcaacgttggaatttataaataaaacgaaaaatttcaaggtttgttaatattacttttatgtggttattttacttactttaagttaattttataaattatatagtttgttcttttaataactgttgttgtcataaatatggatcctgcccaaagagtcgttagattacaacagattcatcaaagctggaccaaagagattttgattttgatttagtttgatttgaaaacttgtttacatcaatatgcttataaatctgttttctgtaagttgaacactctcagtatatacaaatattaaatttagcagcatcacgtgacctaaaagccacagacgaattttacacgagggttaaacaaacaataatatccgatatagtgtaacggctatcacggtccgctttcaccgggcagacccgggttcgactcccggtatcggaactaattttttttaatttgatatttttaatgtttttgatttattcagtcttagttacatgaattcaaaattgaagttaagattaatgattttaaaatagagttttttttattgactttctttctataatggtttctggtaactatatagaaataaagaattacccatctactgatcaatttaatagaattagtgaagcgtccagtatcattaacaaaaacttggaatctagaggagatgaaaaaataaagttttacacaattaaatcaccaaaaaacattgaagaaatttatcaaaatgatcaaaaacttatcaaatcatttaataacttatttcaagaagttgatttattaagaacaattaattcaaccaatgcacaattaattgatgataaaaatcgtgaagttgaatattggaaaaaaatggctcaacaaatggaggcatcaaagaggaatgatgagagtaaattcagagatcttgaagttgaaaatttaaaattaaatttaaatgttagtaatttaattgagaggcaaaagggagtagagagtagaattcgtgaaactaggaatggatggaaactttataaagaacaagtagagagggagaaacgaagatatgataatgataaattcgaactcttagagagattaaagtctaaaagaaacaaaacatggaggaaagatggtaataataatagtccaagtaacagaaatctttataatgacgaaacatcaagtgaaatgattattcaactattatctgaaaaggaattatcaaataagaatattttaaaattggtatcatttctcaaaaacttatataattgtttagagaaacttaaggcaagtgatggaaattaccccattgataattcttttattgctaaagatagtgaattagatggaataaattatactgaaattgatattttaatggaaggattaaacaaaaaatttattacattgcttgaggaaataaaagccgagccttttggcagtgatgatacattcagatctaagagaataagtaaagaaaagaaacaagaagttgagatgttaaaatcacaattagcagaattacagtataattataataaagttgtgaaaacaatggaagaatggaaaaaatggaaagaaaatattcaaagttgagatttaatttaatttaattattattctaatactatagtacagatctacacagtttcaggtttatgatatagggtataataatcaaccaaataaccatttaaattgttttctccaccaacaggtgttgccattaatgttctaaatgagcaattatccccagcttttatcaagaataggaaatctttccaattatttttccaaccataattataatcttccttgacaatatctatcttttttctatgcatcaaatcattagttattagaaccatttgatcaaatcctaccattcgacataatttcgaagttgaaagtttagttatgaaaattattggaaatgcaataaatttggattttttcagtgtttgtgaaacattatcaaaaaatgataagaataaattagtttttatttcatctatatcatcttcatcatcgtcattatcatcattcattgtttcaaaattattttcaatttcagtttcagatctattaccaactccactagttttcaagagaatatttaatggatcatctgcaggaactgaagcaaaaatatcctcttgaccttgatgtgaatgtttatatttatgagaaaattcataagttgtaaaacctttagatatttgtatactttgtactaataataaaattgttaaccaaaacagttgtaatgaaacccaaaaaaagaaataaaacagaaattttgaagaatttgaagcagaacataatccatgtggtaagaaataacacacggtgatattattaccatttaatggaacatcctcaaaatagtttaatgctaaatttaaccatgatataacagcaaattcaaggaaaacaacgaatgcaaagaaaagtttatgatttcttactcctatattattattaacccatggacaataatgatcaaatctagctatgttaagtttcttctcctttgaaaatttggatcttaatggctttctgatattagaatatatacaataattattagaatcaaatttcctttcattaagtaaatttataattgtagattgaatattttcaatattcagtttcctttggaatacaacctggatccatatttgaagatttaatgaaataataaattgttccagttgctgatagtaagaataagaaattgaaaatatttgatttaccaatagttttaggtaatattttaaatatccaagtaataatacaccaataagcagttgatgaaaatacacctgcaaagaatgaagttctcattaaatttaccttaccttttttcaaagaaggtattaatatttgctttaataatatttgctgtgttataattattaataaaattgccaatattttcattattatttgtatattcaatgttaaaacgtaaataatttctggtaatgtaatataaggtaaaacaaatataaggaaaattagcccattcaactgttaaatgagttaccattttaataccagtaattggatctcgtccattttcctttaatacattattccacattgttgaacaattcatatcttttgcaatatcccaacaggatttaccatcattagttttcaactctatattactttgaaattctaataatgaagtaataactgctttactaccattacataaagcccaatgaagaggtgtaaaaccatctgcatcaattaaattaacttcagcttgtgcatttaataatacatcaactgataaaaaatctccttgatatgcagcccaatgtaatgcagttctacccattggatcagtgaaagtttataccatctaaaccaatatttttcaattcaccatcattattatattgattaattgcccaaattgaataaataaccatcattacattacttgaaaaaacagatgctaataatatattaataccatttttatcaattgcattaacatttacctttgcatctctaattaaataatctgcaatataaaccaatccatatctaacagcccataataaaggtgttgcattcatatcacctgcctttacatctggatctgcaccaattgaaactaaatatttaactgttgtaagtttattatttaatgcagcccaatgaactaatgttataccatctgaatcagttaagtttggagagtataatgtattattattattatcattatcctttgataaataatgttttaaaaattcaacatcaccacgttgagcagcatgtattatttgtctttcaatatcatcttgttgattatctaattctttatcattattattatcatcatcattattattatgatcttcattttcttgatgtattgcaaccattgaagcaattgataaatcatcagatgttgaagaagataatgggagggatgtaatagtattattttctatatgtttatccatttcattatcattatcattgtcatgttgatttgaacttatttgatgttgtgtatttttatcaatatttagtgaaatattttcattctcgtgaaccatactatcactagtatcacctatagagacatccattgatattatatactaagccctggataattatttaaagaagaaaaagtgtttatattaataagtagggataacaaacacaatacttttcatgttcgcattatggatatattattattaacctattactattactattgagaaatacaaattgtcagttaaagttttatacaacaaaagttataaaaagatggataatacatattatattaatattaattaattaattaagcttggactaatctcatagtgtttgaatgaccagcacctcttttatgaccttgaataacgacaactgtatcacctttactaataatatttaatttaagagcttcatcaattgcataattaactctattttcaacatcttgaatccaattttcttcatgagcaccagtatatgggaaaggataaacacctctataaagatgacagaatctagttgatctatcatttctagtaaccattaaaattggacaatttggtctatattttgaacaaagtcttgcagttgtacctgaagttgataaaacaataattgcctttgcttcttgttcataagttgcagtaactgcagacattgctaaagtttcttgaatatcacaaggttttttagttgcttctctaatttcagagaattgagtataagcaggtaatgtcatttctgcaattaaagttgtatgatgcatcattgaaactgcttcaattggataatcacctttagcagtttcaccagaaagcataacacaatcagcaccatcaacgatagcattaccaacatcagaaacttcagcacgagttggtcttggattataagtcattgattctaacatttgagttgcacaaataactggtttaccagcaagattacattttgcaattaattgtttttgaacaatgaaaacttgaggagcaggaatttcaatacctaaatcaccacgagcaaccataacaccatcagtttctcttaaaatttcatcaaaattattaacaccttgttgattttcaattttaacaataattttaatatctttaccttcttcacctaaaactttacgaatttcaagaacatcattagcagatctaatgaatgaagcgaaaaccatatgaactttatttttaacaccgaattttaaatcttgtttatccttttcagataatgcaggtaaatcaacatcagtatttggtaaattaacacctttatgagaagaaattttacctgcattaacagatacaactttaatatgttgatcatcaacaatttctaaaacacggaatgataaaacaccatcatcaacataaataattttaccaggtttaataactttaacgatatttttataatcaatatacattttttgatcatttgaagaagttttaaattgatcatcagttgtaaataacatttcatgatttggaggaattggataatctaaattatcaattgttgtaccagttctaatttctggacctttagtatctaaagctaaagctaatggtctaccaggataaacttcctctgattttcttgcattatcaataactgattgatgatattcataactaccatgagagaaattcattctaacaatatttaaaccagcttttcttaaagcaactaaagtatcaacattattagtttttggaccaattgtaccaataattgaagaacgtcttaaatttctttcaggaacttcattaacgtttaagttagttaaccaagatatttttgaactagatgacatattgagagtagtgtgagggcgattgtttaatttaattaattagttaagaaatttggatatttcttgtttgattctttgaaaagaatattaagaagtaaataaataacaacagcagaggggaaataagaagaggaggaaaaagatacctttaaatataaattttaaataataaatataaaacagattaaatcagaacataatggtatgttgccatataacaatgacttaccggtaagtgatgtccgaacggaaatttgtcaggttagtttttttcatcattacgtaatgctattacagtaatatgtcttatattgcacagacgcatcgaccgcattatattttattttattttattgcagacgcatcgacgcgggctcatttgttttttttgaatttttttaattttttaattttcaattttgatttttttaccggactatatccccgatggcaaaattgatcccacattattctttcctaaatggttcaattgcatcacgaaactacacaatgatacagtttgattcaaatatatctacaacacatgaaaagagaacagtcgcaaagaaagcttgtctctcttgtagagagaaaaaaattaaatgtgatggtgaattaattgtatcttatccaactgagccttcattgaataaaactttttataaaacttgttcaaattgtaaaaattcaaataatgattgtatatttgtaccaagtaggagaggtggtaaaaggaaaaaaagtgttagtgttaataataatagtaatgttaaatcaaataattcatcaattatttcagatttaaataataataataataataataatactaataatatgcagaataatgataataataataatgataataataataatcaaatacccgatcagtaccatgatactaatcaaatctataacaataattatccaacatcttcatcaaatatacccactaatataccaataaattattcaaatcataatcataatcataatataccaatgcaaatgcaaatgtcaatgccaatgcagatgccaatgcaattaccaatgcaattaccaatgcaaattccaactataatgcaacatcaaataccaattcaaatgcaacatcaaataccaacaattcaacatcaagtacctatacaaatgtcaatgcaaatgccattacataatgatttaaatgataataattataataattataattataataataataataataataataataatagttataattttcaagcctcctatcaacaatatactaatggtagtcaagttaatttaacttatcaaaattataataatggtaatattgataataacaatttttatactaatcctcataagattacagaattagagaatagaaataaacttcaagagaataattattgtaatactactggagtagaagaaattaatgaaatttcgaataataaaaataataatattaataaaaaacaatttctaaaattgaaggctatagtaaagattctgaatcttgggtagaatctttagctccaagtgattcagttacaatgattgaagaaaagaaaagaaggaaaggtcaaaatggaattcataatcaaaaattatcagcaatttatgaaccaaataacaataacaataataataacaatactaacattaatacatctaatactacttccaattctaatactaattcaaatgtatcttataaaattttatcagatagtttaaatacagatatttcaacaactgataaatggattaatgaacaatcaaatcaacttaagagaaataatgaaaaattattggaaaataataggaaaaaacagaaaaatttacaaataactaatttaaatgttaaatgtccacaatttattaatgaagaattattagaaagtttaaaattacctgatttccaatcattatataaattaattggagttttctataaatatgttcatccaaatacattaattttacctaatatgtcatttttaattgaagatttaacaatgagtagtgaaactattttattaattgcatcaatgtgtaaaatgtcatgtaaatatttattaaatcatgaagttaaaaatgatagatggttagatgaatcatattgggttgaattaattgataaatatcagaaaacttcaagtattaaatatattatgttaagttgtatattacaatgtacaagatctgatgatgattatattactacagcttttgatattttgaaaactattagatttgaagatttattaaatacaaaatttttaagagattttaattatattcatgaaaaaatttttaattcaagaattttattagagagagaaatttcagttagaatgtattggaatgcatataaaatttcaatttttagaagaatttcatttggttatccatataaattagataatgaattaaataaattaaaaattaataaagaaattgaattaccattacctgatataaaatattttaaagaaactgaaaatttgaaaaatttaaaatcttcatatattaaaaatttaacattagataatataagtctttcaaatcctgatggatctcaattatatgattctgtttgtttaattttatcattaattattttagaagatgtattaaattcaatttcaacaaatactttattaccatatacaattattaaatttacaaataaattaaataaaatgtatcaattacatactaaatataaacatttacaagcatatcaattagagacacatccaaagaaggaaccacatattgttatgaatgcaagtaatttatcaagtgttattttaaataggataactatattattattttcaattcatttaagtaatgatttattattatatttacctaaatttagtgaatcatttaaatcccaaattaaaccattaaatgatatttctattataaaaataaatccaaaacttgtaattgaaaaatccaataaacttttaacaaatgaaaggaaattacaaaattggacatggttattaaaatcaattgatacaatttttaaattaatttcaattattcaattaggtgatggagtttgtagtacaaatttaaatgatgaaaatccaattaatgaagtttttgaaacattagttggaccatgttgttcaggtaattcaaaagttgaagaatggtgtaaatttaatacatggacattaaaaatttctaatatttcaaatgataatcaaggatggattcaaatgccaccaataattgtttgggcaatgattcaatgtataccaattttaatgagtatttcacttacattattagtaattgaaattaaaattgaagaattgatgtaaataatgaaaatgaaaatgaaatgaaatgaaaatgaaaatgatgagataattagtgagaatgaggatgaagataggagacaagttacaggagatgcaattcaaattgttagtgattatgaatataagaggaaacttttaaatgatagtaagaaaaaaattaagataattgatagggaaactaaagaaattttaatttctaatattgaatattctaatgcaccaaatttttttcaatttaataattaagggaaatggaaaataataatgataatattaataaagttaatttatcattaattaagataatgattgaaaaaattaaaattatacgtaaattattacaagtttatagtaaatacaatggggattgtacagttgttggtaattattgtgataaactaatgttatatattgaagaattatgtagttaaatatagactatttatattttgttatcataccttcacattcatttgtcattacatgattttcaagccaatctttatttgaactaaattctttaaagcaagcagcacatctaccatgtttatcaattctatcatttgattttgtaccagttggataaacgaaatgaagtgcttttaaatgagttttaaaagtatcacgtctagagaatccaccagttggatgacatcttggaattttcaaattatcataaggtatcttttgttcagtactattattattattttcaatatattcaattgatgaatcaaaatatggacaatggaaaggttttgattttgcatgtttctttaaatgtcttgttaaataacctttaactttaaaagttgtattacaaattgaacaagtataaattttatttttatctttatttttatctttattcttagttttatttttatttgatattattgaagaatttggtgatggtgattcaaattctgttgctgatgatgaagaagaaggtatattattattattgctatgttttttcaatttcttattattattattattattattattattttcattaagttttgtaattgttatattattatcagattgttcaatatattcacgttttaaaggatttatggtattattattaaatgattgaatatgattattatcataatgataatcttcataatcagaattaaatttattttcattttcattctcattttcattttcataatttaaatcataatttgaattatctgataatcttatataagataacattaattcatcatctaaaggtaagggatcatccaaatcattaatattaatatcaatattatgtttaacatgagtattatttgtattattattattattacttaatttattaatataatcatcatcatcaaattcataatcagataaaatttcatcattaaaattattaaattttgttaaattattatttaatgaaggataaattaattgattattttcatttaattgaataatttcattatttcttaaattattttggaaattattattaaaattttctaataattgattataagaagttgattcattatttggatttaaatttgatgatgatttaacagaagtattagtattattaactttgttaacattattattattattattattattattattattattattatttaatactaaatcttgaaaatcccaattaaaaggatttggagaagtaaaatcataatcgaaatcagaaactgcacattgacgtaaataagttgaagttgaattaaaattttgataaataattttcttattatcaaataaaccaacatgtaaatgtggggattttttaataatattagatttattagatttatcagtaacttcactatctttgaataggaatagtaatatttttttatagagtaaatttagattttttgataaataatttattatatttgtaaacattattgtaacataaaggtattattaaggagcaaatgggagcaaatgggagcaaagagggggggtatatttgaagtgttaatggttgtaaaatgtataattaaaaaaggtagagctatggtaaataaaaatgtaaatgatggggatagataaggaaatttaggaatataaagttaaaaatactgttataattataatatctaaataatatagaacttcataaagataaaaaaaaacatgagattgaaatgaagatagaaatgaagatagaaatagcaattatcatgtaaatttggaagaaatttttttctagaaataatttagaaatcaaaatcaaaattatgcgatgatgccctgaaaataatctatgatcttctctatattcctacatatcttatcttatcatactctacttatactttacaatgcgttataatatactatagaatactgtgtatttcaatatcaaagatatactatatactatactataccatatactgtactatagtagatcattggaatacaacggataaactcctcctcccctaagtcgtttctttttattttcatttttagacttaaaacgggtgccgcacaagtacacggcactagcactagtactaattttatttcagtatttcttatctccgtagggggaaagtcttagcgacgttaccaccaggattacgtaattattgaagtcacgtgcttttcacgtgacacgcgtcgacgggacgggatttttgtatattacgtaatcacatgattatttattcagtcttagaatagattcagaatagagtagaatatagaatagaataatgtcatgataattgaatatactttatcctttctacttttaacaagtctatctatcatccattatccatataatgacatcatcaactgatacaataaataataataatacaatttcaagaatttcaatgtcttcattaaatgattatgaattatataatcaattaggtcaaggtactttcggtattgttacaaaggcaagacaaaaaaattcaaataaattagttgcacttaaaaaatttttaattaatgataaaaaggaaggtttccccataactgcattcagagaaattacaattatgaaaaaatttaaaaatttaaatattttacaaattgttgatataatttatgataattcatccttctatacagtttccccctatatttcatcagatcttaatggtttattaaataatccaagaattaattttaatttaagtcaaattaaattaattatgtttcaaattttaaatggtataaattttattcatcaattaaattatttacatagagatattaaaactgctaatatacttttagatattaatggtataataaaaattgctgattttggtttagctagattatatcatggtaatcctccaattaattctaattctcctcctggtggtgggaaattcgattatactggtttagttgttacaagatggtatagacctccagaattattattaggtgatagaaaatatacaactgctgttgatatttggggaattggttgtgttttcggtgaattattctttaaaaagccaattttggaaggtaaatcagatattcatcaagctgaattaatttttaaattaatgggatcccctaatatggaaaatttcccaaattgtcatttaattaatagaaatggtattgatttaaaaaataattatccaagaactttagaaaatcattttaaagatttaatgtcattagattcaattaatttattatcaggtttattaactttaaatcctcaaaaaagatttaatgctttaaaagctttagatgatccattttttaaaaatattccattaccttgtaattataaagaattatccaatttagaagattctcatgaatcagatgttaaacgttttaaagaagaaatgaaatcaaataataataataatgtaccacatcatcctaaatcatttaatacaatccctccaataagatcatcaaataatattaatataccaacacaaccaagtgcacttagttcaaataatataataaataattcattagatcatagtaaatatggtactgattcatcatcttatatgtcaagaactgattcattatcaaatatgaatataacagataccaataatgaaataccattacaaccaaaatctcataataaaattcaaaaatcaaatacttttaatcatcaaataaataatattcaaagacatttagctcaaccttcaaaaaggaaaagatttgatgattattcaaataatttatattatgaaaatgattatgaattttcaaataaacgtttaagatatgataataaatgggatgatagaggaaattataatcgtaattataataataattataataattataataataatcatcatcatcatcataattcatctcataatcattataaaagtagtgaattatatggtagtaaaactaatttaaatgataataattcagattattcagttttatcaaaacttattaataaaagaaatattaaatcagataaaaatgacaatagtaatggtactattgaaaaataattaaataatttttataattataattataataatttatataagggttaatcaatgacagacaagtttttaaattaaatcattatcgatgagtaaatctcgcattaaaatttcaatttaaatcagtaccagtggcgaatgttattaattatttcactgcttctggtggctctgtttcttatttcttatttcttctctatttgattagtttatgtgatcaactaaatgatacagtactatgaattaactgaagacaacaattgaactaaaatattagcttaaaatatacacataagtatctgataacaattcattttattattttggaaaattttctaatttttgatattaatttcttttttaaagtcatttaattgaaccacagttttatgaatacattaaaaacatccattactactcacatactttcttatatgctaattatcaaatgaatactcacaattagccactacaaatgcatacaaatctatgccaatatgaactcgacgcatcgacgcgcgcattggagttggaaaaagggggaaaaagttgagccaccaaaaatatttcaaattcattgatattgatagtggaaaaaggggatcatgataaccataataatgaaatcataatagagaaatcacttctttgggagatacttaatgtatttgtttccctttttttggtatttattgtgctttctaataagtttccccgtttcccactttttttggtttgtttgttatactttatttttccttcaaaactttaaaaattattatcttttcgttttttaacgaactcatagccagttagttactatacattaaagtttagaaagttaataccagatacttgatttaatttccctcaaattaactaaaaatgtatttcaatcctaaagaatattacttcttttctgataaaaccaagaagaattaactgctaattcatccccattctttggaactactgaatttattgaagctgatgaatctaattacattaaatttaataaatgtattgtctctgttgtttctcaaaaagctatcagaactcaaatgtatttattatattgttggtcattaatctattattatttttcatgtaatagattgaaaactatttcatttaataaaatgttgtttgactgttaaacctgctatgtttatgccatctgatgaagaaattaaattgtatatgtctaatcctaaattcttatggagattttctgaagcaaattatcaatatttcttcaattttttgatcctaaaagtgtttgtggtaattttcaaatgagtttaattacttatgataaggatgattcaccaatgatgccttatttgagaaccaaagtttttaaattctatgaaactcaaactttcgaaattgctccatttaaatgataagcccgtttggttgtaacactgttgatgctgtcttgaataaattcaaatttaaattgagtgatgatgaaacttgtgaagcttattattctgatgatttttatgaccataaaatgcatgaatattcaacatattcagattttgtgtatgttattttgactggtcagaataattgcttccctactaaaccgaatcacttcagtaaaccaagaagctttaaacagttggtgaataaaaggaagcaaaattttaaaaatattgcacctttattattcagaaaagtaattcaaagttaaaattgctaaacctcaaagaatcaagaaaattaacaaaaagaaagaaataattaaatcaagaagaactgaaactaataaacttgaaattgttccagttgttgaaaatatcgaaaaatcattagaattctctgtcccagttgttgaaattattgaaaaacaattacaattatttgtaccattacctcaacctgttgttgtcgattctttagacactaatactcgccattcatctgttgtaaatgaaagttatgaaataattaatatgcaagctgttgatcatgaacattatgaaataatggaagtcctttctgttggtgattctttggatgttaattattccacttcatctgatgaagatgataaatttgataaagttcatgaaatagttaaaattcaatctaaatctgattccaaacagagtttatcttcatgtctgaacttattttctagtccagttagtaatgaaaacatcaatcaaaattcattgactccaattcctattaaatcaaatgaacttattattgcttccaacattgttaatatgaaaccaattgataaaaatgatgattataataacaaattaaatcctgtatctgcttcttcaaagaaatccattgatgccactaattccaatgatatttcccctaaaattacttcttccatctccaatgattttgataaccataacaatatttacattcaatccaccactatggaatcaaaatcaactcctatcaaatcattagactcacctatttacattttttatcacttattaaagagtatccttttcaattcaatggtcagtgtaggaattatagcaatgcttttattatttacatttgaaaaatttacattagaatacaatccagaaactttagaacaatccacagaaagaattgcaaataattttttatctgaatttgaattgaatttttactataatgatttgatggaactctctgaagatgaagatacaaatacaaatacagaaacagaaacagattttaatttgaaatttaattattcagattttgaagttgatgaacctaacatgaatgaagcaaaaatgaatgaatttgatgaaaagaattgctcaattatcgagattgatatttcaaactttaacacaaactatgataacttacaaatgtcatttattatctcttatgttgaatacagaatatttgtaaaggtccaatcaatgttttatgaaggtgatgtttataatttttttgatacaacaataattgaatgtgattatatttacaagattgtcaattatctcccattagattactcaaatgatttctatcatgatttacaagtaattgtcattatcaaattttgaatgtttcaatacaattaaaaatttactgctgaatgactctactaattattatccaggtgaagctgatgatcaaattaatcaaattgaatggaatgatgaaaatatggaaaataataatgcttttcaactgaattttaatttatttaaagttggtttatttggaaagaaaaataatacccatatcaattttacttcacctattgaatattatagaagatcttttttattaactgctggtcaggaaaaatttgaaaatgataaaaatatgatttcagtggtgacaaaaatgaaaagtaattatggatggttttttaaattaaatcaaaattaataaattttcttataggttttatgatgtgaatatattcaatattttagatatattaataaaaataataaaataaatcaaaataataataataaaataaattaaaataataataataaagtaaatcaaaataataataataattaaaaaaagataataaaatgaaattatctctttctcttctttctatttccttttctcctgtgtaatttttataatactgcttaaaatgtatttgaattttttttaaactacgctgtagaacttataaaagtgagttacaatcttataattgtatattacttacatttagagatttctaccaaattcatgtaaaagcaaataaatagttattaaaagttataaatagatagtacaaacattaaaataataaaatcaccttttcatgacttttcattaattcacttatagtttcatcactttcatcctctttaacattaattataaccaatctatctaaattctgacaagttttatcagaaataatgaaactaccaataactgatttacctgtctcagttaccattaattgattagttttattaattaatgaaaattcaatattattatattttttctcattttcttgaatccattgtgaaatatcatcatttatctttgattctaatgttatattatcgagtataattctagccttatgtaatcctttacccttaattaatatacttaataattttaatccaagtatatcctttttagttaatttagaattatttaaatataatgtaactgaactaacatcaaatgctgatggatttaatattgtattctctgagaaaaaactcattcgtttcattattaatacttttagcaatctcttctttatttacttcattaattgcattttcatttatctcttgtgtattattgatgaaaattgctttattaaatcggaaattcttactatttttgataatattagatattttatcaaatgaatattgtttttgagttattggtaaaattaataaatcatttttacaaaatgttgaattatcaaataatgtttgagcataattttcaggtaatgaatataatatttcagatgtaaatggaattttattatatctacaaaagattttgaaaacacttaaaattgaatttaatgaattataatcatgatcataatcatttgatgtttcataaagcattgatgcatgtaaaatatctgctgttctctctgttaaagttttaagattaattgcatgaatcggtactttagcattctctaataaaagatctaaaatcaataaatctgttgataaactttcaacatcttcaactgtcagtataattttattcaatttaaaattttcaatatctttaccatttatacttgtaccatatatttcatcatcaatatattcatcatcactatcattatcatccatgacttcattattaatatcatcagtttcaatttcagtttcattttcatctttaagtttctttgcattaatcaatttttgttttctctaataatcttaattgaaccttttctttataactatcaggataacagtaaattgttaacggagttgttaaaaaagttgtaattaatgccataaatataaacattgaataagttttctgtgttataattctagcatttaaaccaacttgtaaaacaacaatttcaacaatacctttacatgacattaaaactccaactgttaaactttctctccaatataaatcctcttaatttagctgcaatcaaaccaccactaattttacctaccattgcaacaccaattaatccaaatgcccaaccccaatctaatcctttatttaataaacctaaatcaacattaagacctgcaataccgaaataaacaggaactaaaagtatattaactaaatcttcaattcttgaagttaatttaatgacataatcattctctcttggaactatacaaccaacaatgaaagctccaaaaattggatgaacaccaattatatcagtgaaaaatgcctgatgaaaacattaataaaagtataattgtagttgctaatcttgaaggattatttggatcatcaaattctttcataatatttttcaaaaggtaatttaataaaattctaattgggaaacaaatgaataaacaccaaccaattgcaactaaaacaatatataatgtaactaatgatcgtgaagaatttgccaatgtaatacttaaagctaataaaacccaacctaataaatcattagttataccagctgctaaaacaacagtaccaactctatccttaactaatcttaattcagttaagattctaaccaatactgggaatgcagttatacacattgcaactgcaatgaaaaccataaatgttgtaaatttaataattggtaaaccttcagcattttctctataatctttccataaaccaattgcacatgcacaaccaagaccaaagggaactgccatattaaataaaccaacacctaatgctgtaactatatgcattttaataaatttaacatcaacttcacaaccaacaatgaaaagtaataaacaaataccaatatttgcaactaatgttaaaccaggtattgattcaggtggaaacatatatttagtaaaattaggtattctacctaaaactgtatgacttaataaaatacctgttaaaacttctgcaataactcttggttgctttattttacttaatggaatatataataattgtgaaattgtaacaataactataagttgaaaaaagaaaatagtatagggggaacttgaactatattcaagcgggttcatgccctcctataataccacttgtactaccagccatacctctagagatagataaaaagaagataaaagaagataaaagattatgataagataaatcaagataaattaaattgtacaagcctcgtgtacaaaaattcatgttgtcgagtcagcaatttattacaatagatgttatacaagtataatgttatacaagttatgctatttgatactatgatctattggttaattggaccttctgtagtttagtcaatctcttactggcatttctgaataaaaagataccaaataatgtagatccaagtataacaatgtaaaaccaattatccttctcttcaatgaaaattctctaaattcataccataggcagctgcaacgaataaaagacctgccatacacattaatgtaatacttaaatttaaattaagtaacattaaatcatttctattagaatctaatataatatttataatttcttcagttgttctaacatcattaactctactttcaattgtttgaacaattgcatcacaatgtaatgaataagtttctaaaattaattcaatttcttgatgatcatcattacttcttcttaaaccattggttttatcagttaaatataattcagctaaatcttcatcttgatctaacatttcatcaattaaatcacgtattcaatgtaggccttttgtaaaaattgtcttaattttttggaaacaattaataagtattttaatttggctaaatcaatatcattctctaagttcttttaaaattccattaacaactgttacatgaatttgcatttcaatcattaaattatcaattacatctgcaaatattgtttcaagtgctttaatttcataatttaatttatcatcttgttgttgttgttgattattctttaatttatctgacatattttcaattaatttatcatctgaatatgtaccatgataattaaataaaacgaacagaatcagatttaattaatgctttaatatgtaatatacttaataaaatacttttctccctaataacaattaatggaacaatatcatcatatcctttatcaattttacgtaaatctcttggcaataaatcatgttttaataataattcagtcttttgtgcctctgttgacattattctatatctaccatctttatcaaataaaatacattttaaaactgctggtgatgttaatgcatttattgatgatgatattcgattatcagctgtaaatgttgaagattgtgaagatgtagaattagtatttaatgatgattgagatgccatttcctttgtcttcattgaaatattggaattactttgatgtgatgaaactaatgatgacaatgcctctgatatattatcatctatattattacccttatcattactacaactggatttattggtatttgcttggaaactttcattgatgctttcccgtatttcatttaaatcctttttctcttgtgctttatcactcctatcactgtattttctgtagaatagagttttataaccataattataattacccatgtgtatatttcgtcgtattatatttgtttgattataaattgcagatctgcaagagttcccacatagagttgccaaacatctccccattgaatatgacgccataccagataccgttcttaccagatacactactgaatgctccatttataagataaaggaagaaagaaacaacccaatcccaagggtatacccttcaaaaaagtgaatataataaaatttagtaatcacgaaaacctatttgtttcatattacttacaatcatgttcttctttctgggatcaacactataactggatttacagttatatgaactttagaactacaattacaattacattaatataacatgtcaagaaagttttcagcagatcagttccatctttcaacagaacttggtaaaggttcatttggtgttgtttaccttgctgatgatttaatagctcataaacaagtggctataaagcaattagatttagaacaaacggatgatttattagaggtacagaaggaaatattaatgctctcaacttgtattcatgataatattactcgatattatggttgttttataaaaggtcataaattatggattataatggaatttttaagtcttggttcatgtgcagatttattaactgcaggtccatttagtgaatcaattattagttatatatgtggtaatgtattaaatgctttagattatttacatgatagtggtaaaattcatcgtgatattaaagctgctaatattttaattggttcaaatggtgaaattaaattagcagattttggtgttgcaactcaactttcaaatattttaagtaaacgtttaacatttgcaggtactccctattggatggcaccagaagttattaaacatgaagaatatagttttaaagctgatatttggagtttaggtataactgcaattgaattagcatacggtagacctccattaactgaatttaaatcttatgaagttatatttgaaatacctaaaggtccttcaccttcattagattcaggattttctgaagaatttagagattttgttgattgttgccttaaaatggatatatcagatagatacacagcaaaacaattattattacatccatttattaaaattggtaaaaaaattaaaaaaattgatattcttaatttattagataaaaaattaaaatgggatttagaaattggtaagaaagcaaaacctaaatatgtaccaactgaattaagatctgaaaatagtaataagaataagtctaaatcatcatcaaataagggagatttattaaataactccaatgatatacacagcacaattaaatgggatttaactttagatcaaaatgatgatggtggtgatacacttaaaaatattacagaatcagttaaacaactaaatatgaatccaaagatgaatattgtaccacaaagtccactaaattatgatgaaaaatcaaaagatccaatacaggaacaaaaagaattagatatgaagaaagaaatgattgttatacttaatcaaacattttcaaaagtgtctagtaaatataatcttacaacgtctcaatatgatcaattagttgattttgaaaatcaattaatcgattcatttttcatgaataaagatgatagatatagagatatattcagtaaattttataaaattttcattaaaagagttatgagaactgaaaatgaagatttgaaaaaacttgtattgcctaaatattacttatcagaagaggcagaattgaaacagtttcgtgaagttacaggtaagaaagctgataataaacaaatattgagagaagaatggacacctgaaccatcaaatagacataaaaatttataaaaaatataaagggaaattcctatacattatatgaaagaaactaaactaaactaaaatgcaaacaaaagaactaaagaaagggaaaaaaacaaactattgtaaacgattatcaggttttttaaataatgagttaagtcttgaacctgcaaactttaatttttcaaaatgagttgaaagtctttccatttcgttattaagatcaccaaaagtatttacaatctttgtaatttcaacatcatcaaaattattcttatatttttcaagatcatattctacatcaataattgaagattgactgtgacttttacatgatgctgcagcaatatgtttttttaatttatcgtgtgcatgacgtgtgaatctttcaatttgagtttcttctggtttattatcaagacaatcatggaatttatcattatcaagatggctgaaatcatcattaaaatcggtgttaaaatcgttattaaaatcattttggaaactattatcaacttgttcatcagacttacccttgaaagaaacatttcttttaagagatgacttacgactaattgatgatttacggctaattgatgacttacgactaacttcacctctaggtttcttttcatcacctcttacaaccatagtttcaatctgttcttcctcatcctcaaatttatcaatgattttcttagcttgcttcttttcctttttaaaatcaaaatcaccagttttttcatctttaattggaacatatttaaagcttgatttaccatttctaacaggttgttcatcatcatcttctaacatttgtttcatcctttctctcatttcagctctagtttcaagaacaacaacagtaccaactttagatcttaataaattgaaaatatcttttaacattaaaatatcagttgaagttaaaattttagaaaatcctaaattacctctaccttcaaattttgataaatcagctaaattatttgcaattttaattaattcattttggaaaagtgaatatgacattataaattgtgttaaaataattgcatatttatcaccaaatacattatcagctcttttatcagattcacttttagctaaatcttcatgattttccctaatatttttatcaaattctgcaaaactgtcatcttgaaattcaggatgtgcatgataccaattataatatgctgttaataatggacgtgtcttaactttctttaaatgaataaagacatgtttaatatgatttttaactgctttttgattagcacgatcaattttgacatagttaagtttttctactgcttgcattgttaagatgttttttttgttttgtttggttgaagataagataagatagttaaaagtagatgttgaaacttaggtactttaccatccttttatagtatttcaattcaaccaactattgggtggcttgattttgaaattgttgtgataatctaatgatttaactaattactgggttttactttgtgatacatcacatttctacaacggaatgcattgctggtttacaatttcctcaatagtagaagtttatcaacaaaagttgaacaaataaagtttgtgatacatcacatttccaaaaagataaacaacaaaaaaaagatagttacagaccgtgaaatgattggcttattctatagaacattaaataaaaaaataagaaagacgtagaagaattattgtaaattaagattacccaatcttgcctgtaattcacgaatgtgatcaccctttgctgaactttcaactgaagatggttgtaccagtttagcaggtttaacaggttttgccggtttatttgattcattaataacggaagagtttgacagtgatgtaggtttagaaggtttagcaggtttaccaggtggaattttctttggttttcctttaactgctgattcaagctcattagatgataatttagcaggtttaggtggtggttgctttttagtaaatgtagttgtagatgtagttgaagttgatacaggtggtgatggtgaacttagtggacttctatcatatgtagttggtggtattataggtggaggtctattgtcatatggtggtggagcaggctctttatctaataatgaatctgtttcagttgaatatgatggagtataagttggacgtgctggaggtggaggattttcagtttgtggtgatttaatagattcagttctttttgcatgagctaagtggaggtggttgaatttgtgaaatatcaggaagttcaaatcttttaggaggtggtggaacttcagcttcaggagttacactttctctttgaggtagggatggaattggtctagtttcagaagttgaaggtgattccattgccgctgctgatggtttggaattaatattttcctttgatgtattaacactgcttgagaaactacctaatggtgaaatagacttacttgtagtttcctttgccttttgtaatgaattttccttaatttgtttcaatctttgagcttcagctttccttctctcaattttcatttcttcatccttcgttaatcttgccttaggtggtggagcaccatatttggataaatcgaaatccattaaatttgtcttaaatttaggttcagttataacttcttcaccaggtttttgtaatttgggatcttttggtttttgtgctgcataatctgctggatcataaggtttattttcaggaatgttattattttgagatagagttgaaggtacttgtctagctggtggttccggatatgccgatgaagatgcaggtaaataacttggttgttgttgatactgcggtgaagctactggaggttgtggtaattgacgagatggaattggtggttgtaaaggtggaattgtttcttgatttggaaatccgtaagagtttaattgaggatttggatttgtgataggtgttgaatgatatggttgatcatatgatagaacatcaggtggagtagtaccattatgaggtggaattgttggatattgattaacatgggatccataactttgtggtggataaggttgagaatcaacacgctgtggttgtgatgggggaaccgatgaagactgatatggtgttggttgttgaggtggaggaattggttctctatactgttgttgatattgttgaggtggttgtggtggttgtggtggttgtggtggttgtggtggttgctgatatgattgaggtggttgttgttgctgatatgattgaggcggttgaggttgttgttgttgatatgattgaggttgttgttgttgttgatattgttgaggtggttgcggttgttgaggtggttgctgatatgattgaggtggttgttgctgttgataagattgaggttgttgttgttgatatgatgattgagaaggatattgttgaattggaggttgtgacacttgtccatattgaattggaggttgttgatattgtgattgatattcctgtggaggtggaactggttgtccataagatgattgaccaacaggttgaccatattgaggttgtaaaggttgttgttgttgttgataagccacatttgaattaaaactttcagctctaccatatgcagcaacatgatgaggtggaggtggataagatttaggatcttgatacctaattggagcagaataacttgatctattaccatccgactcatcatcatcatcattatcattaccatctttattattattaccaccctttgatttattattatgatttttataagctgaataacctgcctttgaaacagattttgtagctctaccagcacctttcagtacagagatactacctgacttgatcgagtccttgttattatcccagaacgacatctattgttgtataagaagagataaatgaagataaagttcattaagaacgttaagttaaaatcttcaatctactatgaatattttatatccgacaaacaccgattacatgtttttcttctttgtttacacttgctttttacagtgtttattctctggtaaagtaggaggaatatgtcaaagatattcatcaaccatacgttcaaatgtatggccatagatacatttgttaaagaagaagatcgagatgatgaaaatgatggaaatgatgaaacatttgatataattcaatacatgtgttcagatgttgaaagtttatcaactaaaaagttattaaatcaaataagtaaaactattataatgaataatatgtatacaggtattaatagaaatacatacaatggtagtttaataccaacaaattccaaacttttctcaaatggatcaaatactaataatatacctgaaatttcacttataagggattatcttgaagttaaattaaagattgattatttaaatgaggaagaaatggagaatgatgatgtaacgaagaaggagaagagaaagataatgatgatgaaaaattaataactggacattttagatttcatttaccaccaataataccaccacaaattataattttaattaaatctccaatacctaataaattattattattctttcaaggtaatattaaattcctaaacattttcacaaatcatatccaaagtaaatttcaatgtgcaataactgatatttcattaaataatttatttttcgaaaaatgtttaaattggtgtattattaatgataaattaaattctataggtacattagaattatggtttggtaaattagaaacaaagggtaaattaggtagtataataattaaaatagaggaaaatgatttattgaaattgaaaagtttggttaatgataatgaacgaataacttcaatactttatgaatatttaaaacatgaaactagtatattatttgagaatctaccattagttaagatacgatgtcaattatttacaattagtattgatggtaagattaaattttcaccattaatgagtcatttaggtaaaacagctaaatcattaaagaatgatgaaaggttaagtatttggtggataattcgaactttatcaaacaatatataacaagttaaataatatttataaatacatacataaatacatacaagattatttttcaggtggatttaatttttcaagtttttcaaaatcaacatcaaaactactaccacaaccacaactactctttgtaagtggactttcaattactttaaaaccttcaccaattaattctttaacataatcaattttagaatctctcattatctctaatgcatctttatcaacaattaatttaccaccattacgttcaaataatgaatcattattttcaggtttaaattcatcagtatttgtaatttttaaatcatattgaaatccatgacaaccacctgatgaaacaactaatcttaaagctaaatttgatttaccttcttcttcacttaatttatgtaatttctttgaagcagattctgttattgctaattgtaatggtaaattattatattgacttaattgttgattaataatctttgtagctgtaaaatctgaatttttatccaatgataattttttaaattttaatggagttgtaggtgtagttgattgaaaccttatctgttgttttaatatctgtataccgtatcttttcatcatattctcttattggttaaaagaatgcatatccattaagtattactaatttagataaaatttcgggataaaaaatatttcaacatccattccgaatattacataatacatgctatagaaccctatatatacactatagacaataatatacaactataaagcttaataaactaccaagtagtaatgaaacattaattaaaaatgcagtaaatgaagcagctgcctttttctcaacatctgtatctaataattgtccaacattcatataagcactactaaataattgaccatttgttataccaaacattaattgaataaataaataaccaaaatcattgaaaatataacctctatttttaatatttgaataaaggaataatggtataaataataatcttaaaatggaataaatcattaaataattatttttttcaattataaataatttaattgcacataataatctaccaattaaatcaccaatattccaaataagaaatgctaatggtacaaataatttttttgaaatattatttgttgattcaatatttgatgcaaaaactggaaaaattaaagtaattgaaaatgtaattataattgttaattcaacaaattttaattttttccaaagttgtttaaatgtaataaattcatcatcaggtttagttatttgatcaagtctcaattctaaatattcatcagttgtagtatctatcagtttcatcattatcagtttcattgaaaaaatcatcaggtatataaattcttttctcataatattccattatataaaataataattgtgcaaataatgcaattaaaatacttgttataaaatatttaattgcatctaattgacgatcttcaatattaattttaatttcatccttattggaagaagaaagttaaagatattttatcatttgatataactgccaaaatcattgaaattgatggtaaaacacctgaaattgcattaccaacaacagttgcattaacaaatattggtaattgcatattaactaatgccattatccctacctgtgttaaacaagaaccaattgaagtaattaatatattaatcattataaatataaaataagaaataacccaatctatagggtataatataattgataatgttaaaattatgaaaataatcatttgcaaataattaccaattttaataattaatgaataatttataaaattttgaattttatttaaatataaattaaataaaactgaagttaatgttgaaattgtcatcattgaagatgaataattatttgataataaaggatatttggaaaatctatcttgaaaataatctgatgctgataagaaacaattccatggccataatgatgcaatacctaatattaaaaatgtaaaatattttaatgttgataatctaacaggtacataattgaaaatatggaatatgatagtattatcccttgataatattaaactttgatccaatacctctctcattatccaataaagaaagttacagtaagtattaattatcacaacattaagaaattagaaattcatgaaaatcttgaaaaagcagaattacctaatcgggaagatgttatatcatgcacttttactatcagaacaacttctgctaccattttactataccttttacaacttcaatatattctgttataccatctataatagctataaaaaggttagaaagtttatatagatagatattctactacacttttcttcttttggaaatgtcattcccatttcctattatatcatacagtggtgaaattatcaatgtaacagattctgaactgattgatcttgcaactgaaattgagaattttccccttattagaagatattcccaaataatgataatccattatacaacatgaatgaatattcatttgatagagaaatggaacaagaattttattttgatgaaaataataaaccaattgaaacaaagagaagatttagaaatttaaatgaaatttcaattgatagatttataaatgattatcatttagttccatttggattttcatattatgaaaattttgctaaaaataatgaaattccaaatgatattaaattccctaaaaatttatcatttcaatcaaaattattatcaattgaaaataatctttcaccttataatagtttaattagtccattaattaatgatgaaatttggaaattaaattataatgatccaatatttacaaatgatactacaccttcaaatagatcatttgcaagtgatttaagtgatgaaactctttataatgatataagatataataataggggtcaattaacacttaatttatttaataatgaaacaattaatttatcatcatttgaatcattaataagtgatgatgatatttattggtcaagaagatttttaagacatcgttagtgctatacataaatagcattattatataattgagaattctcttaaaatattttcataatcaaaagcagttataatcattcttggatctgattgatcatttaaatttaatgtaccattaactatatcacgacgtaacattgattctcttgtatataatataacatctgaaattcttggtatcaagtaaattctcatatttgatttataccttggtcttgcaatttttttcttaggaaagttgtagttatttcatcatttgaagttttttcctatgaaaaaggttgtggagttggtattatatcaatatctgtattaattttcacctccttcattatactgtttttctttttctgtaaataatttatataataatcttaaatcaaattcatcatcatctaaccatttatcatttggctttgcagtttccattttaagtacaattgcaccagttttctcaaatgctgcagctcttgtaattcttaaaaatgtaaattcctctaatttaaaaatttccttaacagctttattaattgatttataaacaggacaattaaattcatctaatccaattgaattagggaaaatattagatttattattaataaatgatgttaaatcattatcattatcattatcatctaagaaagtaacagcttgagatttaccagggaaaattgctcccatatttgtagaagtatctattatattctcattattactactagtatttttaaatctccaatctaccgcttcatcaattaataattcatcataaattgttctttcagataagaaacctctctttaaaactttaaatttatttttcatttctttatataatggaggttttgaaaaatttttaaaatctgttaaattcattgtttcagtaacaagcattgaataaagtgttggtaaatttggtattaaagttaatctaactttagttaaaggagttaatggacgtccaattgaagtaattttctttttagttacttttgaagatgaagatgaggacttatttttattatttaattttaattttttcaataattttaatctaatttctttaaattttgtattatctgaaatattaagcatacttatatctttatttctatgagctaatttaaccatttgaggtacttcattaattatttggaatttaggtttattgaaaatatataaaggaggatttggattagttattaaaattttagtattagatggtgatattgaagaagttaatgatgaagtggaagatgatgatacagttgaagaagatatattatttgaaatattattaagaaatgatgttaaagaagcatttaaatctaagttagtattaagtttatcaatatcaattgtatcaatattaatatcaagattattattagagtcagaaagtgaattaattaacatataatcattgatgttgttattaacattaatattattgctattaatattattgctattattattattgctattattattatttaattgatctgataataattgtaaagataaatgatcattatagggtatatagtgatcattcattgttgttattatcctaataaatcagttgaaaaaagaaacagttaaataaataaacagtttagtaatatattcccaggatattgtacttagtattaatattgattattaccttaaatggaatattaatagataaggcacgtgtattaattattttaaatatatttgattacgtaattgtcacgtgattaatattatattacgtaatattattactgtattacgtaatattaaagtacttacgtaatatattatcacgtgaccgttcattttttaaattacgtaatattataataaatataattatttttagagtggacacattgaaattgaaaaaccattattaacattacgtgttttgatttaattattatacaaggaatgctttctttctttttttgtttttggcttttgtatatttcaagatcattattcaataactatcactaaataataatgaacagattatcattaattatatattccctaatttcattattatttattataactccatcatttgctcatattgctttattacctccaaggggtaaagaatgtttttatgaaaatttgaaaaaaaatgatgaattagctgttactttccaagttggtgatagagataaagattcaacaaatcaattaaattgtgatttttatattaaatcaccattctggtaaaattttaaaaaatttaaatgatgttactcatggttcaattcaaattaaagcagaagaaaatggtaaacatttatattgtttctcaaatgaagattcaagtttgaaaactaaagatgtttcatttaatgttcatggtgttgtttatgttgatgttaatgataattcagatgataatttagaatcaagtattagaaaattattagaattagtttatgatgttaaaaatgaacaaaattatattgttgttagagagagaactcatagaaatactgctgaatcaactaattcaagagttaaatattggtcagttattcaattaattgttgttatcttaaattctttatttcaagttttctatttaaagagattctttgaagttaaatctgctatataattaatgttataatatatataaagttaaatagagtagactaagcagatggagctaaaaatccattatttgcaaataaattttgacctgtcatccatttaccatctttaacaataaatttaataattggaacaatatcatcaactgcagttaatcttttttcaatagcttgatttttcaaaaaattaattctaccttcatcttcttttccagaaaggaatggtgtatccattggacctggtgaaatacaattaaaagtaattttcttttgagtttcctttgaagcagttttacacatccaataaacggcagctttagaagcttgatataatgaaaaaccttcagtataagcacttaataaagaagttgttaacataacaactgaacctttttcacttaattttaattcagaatattttaaaaataaaaatgatgctttaacattaatatcaaacattttattatattcatctaatgaatttgtaaataatggttttctaatcattaaaccaacattattaattgcataatcaattttaccaaatttttcaattgcaatatcaaataattcaattgttacactctcttgtgataaatcaccaccaaatgtaattgccttaatattataatcattaattaataatttagctaatttttcagtttcattagcagatgatggtaaatgataatgtaataaaatatttgaaccttctttggcaaattcaattgcagtttgtttacctaaattcttattagcacctgtgatgatagttgatttaccgttaaacattgtatattgtctacagagagaatagaaataaagaagatactatataataaagaagagctgctaccactctctatttaaatattcaaatgtaaactccgatcctccgcacaatttctggaaacattgtcgtgaaatggcataatttgtggaattaacatggaattaacatttaatacagtttctttaatcaaatgagattaactagtatgttatacattaataagtccgttgtaactttattaattttatataaaattatcttatctccgtaaataatatatacacaattacgtaataactccgatgcttacataagaataattaattattaatttaatatgtccattccctctcttatattttcattactttcttcaactttcacaattacaatcagatcatcgacttgattaaagtatattatattgtaatagattagaagtcaaaaagtttttaataatttctctttgactcttaatctatcacaacaattctttaatcaagtcgatgttgcaattgtattttaccagttaatatttttattagataatttgttatttaaattattaaaagaacgagaaaaatgcatagaacggttacccatagggataaaaagttctgaattttattaaaacgatatggacgattttattaatccatggatatcctgcgactcttcagcataataaattgcagcattcaaggtatgtggtttttgttgagataccatcttctttaattcaggtgttaaaccaagaagatatctggaaatttggttctttggagactcttcacggtctaattcttcaaggtagtctttgaattggtcagaatatgtggtaactttcattcctggagtcattttgtaagtataaatcttaaaatctaaagcatgcatatcatacaggacaaaattcacttaatttatcaagaatcaagagttttgctgtttacatactcaccaagctcatataatattgcaatttgttcagcatataatttttttattatttgatctgtgttcccaccgttatgattagcaacagtaatattctgataaactcgatacccactttctctattcttttcataacattcttcaacatgaaagcaatcaacaataattattaatttaagaatcggttgcactcctttttgacattcgaaatcatggtacaaacgtgttgagaaatttatatgcttttattaccatctctttaactgtttcataaatcaaagttttcacctgatctaatgaatatttgacaatactagggatttatatatattattatttattatttatataaagatttgtatattgaatcaagatgagccgccatgatatcaactatcaatattcataccaaaactcatcaaaactcatcaaaactttcaattacagataagaccccacctaattggcctcctatcaactataaagtcatcatgatcatgttaaaaagaaagaactacattaaagtataatgaaccatgtgtatacatacatgtatatcaactcttatatactgaatatattacgtaatataaccagtacaccattattaatattgtaatataataccttaactaacatgaatacctcattggaagatgggatatatacctctagagatacatctttaaacatccacaacagacaaacatgtcagatagttctaatttcccaactgctacacctatagtattcacacctgcacttttatcatcccttgattcatcaactaattcatcaattacaagatctcaatcaaaggaacaatatttacaaagggaaatttccaacaaattaaataatttaataaataatgaaaaatcaataatttcaaattcaattgaaattaatcaatcatctgaaaatgataacatgttaggatcacctgaattaaattcaaaacttgataaaattcataaaattttaaaatcatcagctgaagctaaaattagtaaatctaatgaattattagaaattgaagataatttaaataattgtcttttacaaaataagggtaaacctcttaattgttgggatttagttcaaaaatttaaatctttagctggtaatccataataaagtatctatatagaactatttacataccaactcctttatataataaaactaatgcagaatctccttcactaccacctgataatgatctaattttttccttatcaacaattgtaacaatatcatcattaaatttataccatctatcaccacttaaatctttatcatctttaataaatgcttgataatgtcctgaatctgcacttgcaccttgatgtgcaataactccaattaattcatataaacttgataaatttgaaccttcattatatcctccaatcttcttctttaattcttcaaatttttccttactcttaatttcaatttttttcatatcttcaatttgtttattatattgttccctagttgttaatccttcacctaatttaatttttttcaatgttctaaattcttcctcaatttccttttcaactttgtaaatttcctccctagattgaattaatttttcacgtttactttcatcaattaattccattacatctaattcaaatgggaattgaactttacgcataattttcgcctttttaccactttcacgtttccaataaaatctaacaaaattaattgttaaatattttggtaattcagttatctttctattaatttcatattgtgcattcctacctaatctttcattatttttctcaattttctcctttaatccattctttaatccatcaataagaaaattaatttgtccgttaatatgacaattcaatttcattgaatcttcaatatcatatttaacatcagaatcttctgcatcactactttctaaacatttagtttcactcttcatttcaattttaaaatatttctctaaatctgggaatttctcaattaaaactcttaaaatttgtgaataagattcctctgcatcttgttgtttataaaatccttcccttgatctttcttgaaattgtgggaatgcatctctaacactacttaaaaaatttaatggagtgattttttcacctttagaattatctaatttattaaataaatctttcatattattaactaaagcattacttttatcattattttttcttaacatcatcctttaattcttcaatagtatttaataattgtatactagaatttaaataacatgtattacctaaattggttaaacctgatggtaatccaattaaattactattgattaatttcattatcattatcaataattttatcatcattttcatcctttgtaataacttcacttaatggagtacctaacatcataataacttgattctcacgtaatgataaacttgataaaattgcatcatcctttaatggacctccacgtactaaaattttttgtctatcagttggtaacattagttaatttaaaaatttcttctttaagtttaataccagttgattctaaatcaacattaatatcataaactttacctgaatgtttaatcttaattgccaatgacattgtctttgtctaaaaggaaattattccaaaagaaataggatggcaaaagtaataaataaatatcataaccttattactacatgaatacgcgttaaagaaattccactatatatttcctaattaagtaactatttcaacattcttacttatatcaacaatttcacttccattaacaggtacaacagtctctgtttcaatctctggcatattaggttcaggtcccattgatattccattagttggattatcaatatttaataaatatcttaatattataatacaaccatttttagataaaactaatgaattttcactacattgaataccagcacaacaaattggacatccataagcacaattacaattttcaacaattttcaatgattcaatcattaattcttcaatacattcaaatattcttgaacttaatccattaccttgtttaccacctttattatcaaatattataattcttgcaggtctctttcttttactatctcttttagcaaattccttttcaggtgctttacattcacatccaatttcatcaaatcctccaatagttataaatcttggtataatattcattatagaatgttcaactgcatgaattgaaccagctaaattaagtccatgatttttcaaaattttaattaattcaattggtaaatcaatccaaatacctttagatttatatttaacgggtggattattaacttcaacactatctaaaattttaccacgtttatcaattttgaaaaatccgaaaataatacttttcttaattatattaccaaaataaattggtaaatctaaattttttaaacttcttaatttttcaattaataatggatcaatatctgtaaaatctctttgacttgttgtccaatcaacattaactctttcaacaattgcatatttttcatcaacattaaattctttaattaaatatggtaatccttgatgaatgaaaattccaccttcatataatgtaaatgttgtcctacttaattcaattgtttcaataatttcttgtctaccattaccaccagttatatcaacaactgcaaaattatcttcatcaattgatctaattgaaactaaaattggaggatgtggtaaatattgatcattacatgtccatttactattattattcattccattttaatttatctctaattaaattttcataaatttcccaatttaaacaattccaccatttttcccattcaataattaattcattattatttacattaaattctttaaatgcacattgtaattgaccttcagcaattaataaattttttaaatcaatacataaatcttcccattcatccctttcaactaattcattaattttattaatataatattgactaattggatcattatttgcaattaataaacataaactatcaaaacctcttctacctgctctacccatttcttgttcaaatccacttaaacttaatgggaaatccacacatatatacaacatctaatccaccaatatcaataccaacttctaatgcatttgttgcaattatacatgttaaattaccattaaacatttgattttcaatttttcttctatcagaaattgaataaccacctctataactcattatttttttcaaaatttcaggttcatcctttaataataatctaatttctttcataactaattcaacaatttttctaactgtacagaaaacaattgtacgtatatttaattttaataattgaacaattattttacatgaatcactaatcatactaccaccattatctaaatttggattccaaccaattatatttctaataccacaaggtgaaccatttaatttttcatcaatccataaaattttatcattattataatcatcaattaaacctgtcattttacttaaatgtaatgaagcattatttaaagttgcagaacttgcaataaattgaatttgattattaccaaataatgaacaaattcttccttaatctacgtaaaatatatgcaacatttgaaccaaatgaacctttataaatatgtaattcatcaattacaatatattttaaattttttaaaaatctaatccaatttgaatgatttggaattattgttaaatgtaacatatcaggatttgttaaaattacattagaattatttctaataaaagttctatcatgctttgttgtatcaccatcaaatgttgaaattaaatttttatttatttgaggtaattctaataaaaattccataaatgaacgatgttgatcctgtgataatgcctttgttgggaataataataatgaagttgattcattattagttaataaagattgtaaaattggtaattgataaattaatgatttacctgaagatgttgaagttgttgaaataacatgtttattttcaattaaaattgatttaatacctaatgattgatgtgaataaatattttcaataccttttgaattcaataaatttttcaatgatgaatgtaaattaatttcattgaaaaaattataatcataaatagcatcctttgaattaatttgataagtagaagttgatgaattaatttgattattataaaaattacattttttcaaatgattaattatttcaggtattggtttatgaacagtttccactaattcattattcatttcatcaattggattaattaattttatcttttcaggtaaatatttttgataagatcttaaaatatattcataagaattttcaccatgtcttttaacaaaattccttaactctttcttaaatctattatcacgtttaataattaattttttaataatatcaggagatggaggtttaatattactttgattctttatataaccggatctattacctgaatcaataaattctataattaaaatttgattattatttacttcatcagggttatttttatcaatatcgaaaatatcaacattttcactttgattttgtttaaaaccatctttccaagtaaaatgtttttcctctagtataaattgatttttatcaacatattcaaatataagattatgaggtataattagctttaatttagctatatcatcataaattaattcatgttttagagatttataaatatgttccttaaataaatcaaatgatgttataatatgtttccttgttgataaaaatgtaaaatatgaaactaatttaaaatgtaaagtttctaagaattttaaatcattatctgaattgattaatgtatctattgataatatattgttatgtttctttccctctaatagattattcatcttgttataaaagaagtgaaggtggtataggaggaacctatgctgacataatataaatttactatattatattattatatacgaattatacaaactcaagacaaaacttattcatcatcatcatcatcatcgtcgtcttcatcatcatcagaatctaaattattttccatttcctttctctctaataaagcttgtaattcagcatcttccgtagctgtaactgcctttggagccattgcaatatcacatacaccaccataacttgtaattttattattaacaatttcaattgcattatttaaaatttcaatacccatatttttatctaaactttgagctgttataacatatcttggagctgcaactaatttaactttaatttgattattttcatcacttaaattttcagctaatgttaaagattctttaattgcatcaataccttcatatgagaaacatgaaacatcaatatctgctctacatttaattgcttgaggtgataatcttcttgcaatattttcctttaaatcatttaataaatcaattgaaggagattcaatatttgtagattcaaatattgaaggatttgtaattgaaattctaaatgcatcgaaggcatgaccatattctttagctaatggccaaacaattgatttatagatttcttctaaggggacattaaatttttctgcacatcttctaacaattgaatgtacagcttttgatttattatatctttcctcacattgaacgatatcttcagttgaaacacgacgttttgataaatcaatataacctttctccttatcaactctaaggacaacagcaacttcatttctaccaactctaattaatttttgaattgatctaatacgtcttcttgataattcactcaataaaaccataccttcaatatcatcatattctaaaagtttaacataagcccccatttcagcaatttgttgaacattgaccatcacaacatcatcaacttccgggtatttgttctcatagaatctacaatgtgatacattcattatacactgggttacctatagaagattgtactactatctaactatataatatttcatgtagtgaaggaaaatgaaaaaatttttattttccactattaaagtatttacttaacatagacgggtctacatacatagacataaactaattgctttcttgaaccttgaaagaagaacttaacaacacttacttgaatgctgccattgcaaccattagaattaaatcaaatagggaaaaccagaagattctgctctctgtggatttgaacagttgattggtttctgttatttctagttttgtaataattgagtgaattctctaaaaatgttaatttcctttcaattttttcaactgataattgcatattttcaactgcctttgttctcctttggtgcatttggtaaattagccttaacattcttctcctcttcctcttcactagttttaatttcaaaatcaattactttctcagcaaatgttgacatttcattatcaaagcaaaattcatattcaccaatttgatcggcattgaataaataatctccttgtctttgtttctcctcttgaacaattattaattgatttggcgctttaatggtataattaatatcaaatgatccacctgcttgaactgcaaaatagtatccaatattattatttgtattagtattgaaatgcatagaaacattgtttctcattaggtgataatgtaaatgttaatgcagtagcagatactgctgtgatatagtataataatgtaataataccgttcatcttgtcttgctcttaaaagaaaagactacaagtaaacatcaaataaacgccaaattcaaattttgtccacctgttaactaaatgattacgtaattacgtaaattacttaaatactgtatgaacaggtcttaaatagacactggcaatactacccataacaaaacacatctcatccactgtatcatcatctaaaccactgttagtattcgtactgatactgctatttctctttagtatctctttaacattttataatctccctgacaactaataattaagtctaatataataattaactcttatctctaattgtttacttattccactgatatctcccattatactaagcaacttatcactttcatatccaatatcaatactacttttaacaatacttgttaaataagtatcaaaaatatatgttttcttatcaattgtatcaccatccatacgttttattaatttacccttaatatcaattaattcttcaatcttatttgatctattcaatatccaaatatatgatataatatcttcatcattaatataactattatcaatattaatatcattaccaactttccctaaaaatacttcaccatatttttgcatattcttttcattaacttcccttaatgcaattgatattgataaataatgtttatccattgtaatcccttcttcattgattaattcattcaacaatttttcaaatttttcatcatcctttatgattaaattacataatgttctaattgtcttatatgatatattatcatttgatgatttaattaatggtttaagttgtcttataatatattcatttgtatctttctctccatttaaacaaattaaatataatatctctaattttgtatcaataataaaatattcaatatctttattttcatcaattataataaatttttcaattatttccttatattcatcattaatattaaatttaataacaattaataaaaaattccttaataaattaaagaatactatcctatcattaataaatttttcaaacattctcttaaatgaaattataatttcattaactattttcatataaaatttcccatccttttcaactccattaagataataaataatacatttaatagtatttaccattattgaaatatcatcattatccttcataaatgattcaatacatgtaataacatctttacataattgatcaactttatcaatcttaaatttcactaacaatgaaataattgaacttgttggtctctcatttgtaataatcgtaatcattgttgatacattaccattatttaattgaattctccttgtactatatttttcaatttctaacaaagtatctgcaattgaactaataatttcataatttttacaattattcaacaatttcattaatttatcaaatattaaatcaattttatccttattcttattattattcttattattattatctaatttcttaactaatctaatacatgaatgtataaccattgtatcatcatcatcattacctccatccaatttatcactaaatataatcccataatacacttacaacttctttataaatatcatcactaacacatttatcaccaatacatgaaagtaattctaatttcccaaaacattcatttttattcaaatattcaatcaattccccaatccattcaaaattttccttaattatcccatatgaaccatttaatctcatttctaataaattaaatgttaattgattaataattttatgatcattaaacattttataacattttaaaataaatgaccaaataatttcatcatttgaataaatatcaccaattgatataaaatttgctaataatttctttaaaataccaattggtggatgtttaaaactaatagatttaatttcatattggaaatcatgatgtttaataggtatataaagtctactatctgacatttactaaaagaagatgtaggaggtaagattatgataaaatgcggatgagatgcttatatgttgattatataataaaataaaataaaagatagatagatagataaaaagtaggttaaaataagataataattagtaaacttcattaataactgatcctgatactgacaatgaaacagatcttgaatgattattcattgatgatgctctatcaataaaatcttccattggatcataatcattattattattattattagtatgattattattattattattattattattattattattattattaatatgtaataaagataaattaacatcatttaattcattatcattatcattctcattctcaattgaaccacctttccaacctttattaattaatgataataataattctttaaaaattaaattccaatcatttaatgtccatgattcaattattgaattattaatatttaataaaactaaatcatttgcagattttttattaatataaaaagtatttggtaattgtggtaaaccaaataataaagaatttttatcatttcttgatgaaataaatttttgtggacgtccataaagtgaaaatgaatttaaaattggtattaataatcttaatgaaatttcacatggtttaacacttgcatgattttcaggtataatataaattaaatgtgatttaataattgattttttaattaattttttaggagttttactattattaaatgatgaatctgatattgttgtatcaattgaactaactctttgatgtgtattaattgtattatctgatgtagtattagtattatttgaagaaacagatcttaatgaactaatggaaagtctcttagataatgaatttgatcttgatcttctacgtgatgatgatgatgatgatgataataatgatgatgattttttctttaaattagttaatgaatttgaatcattatttgaaattgtttcatcattaagtataatatttaataaatcttcattaatataacaattaccaaataatcttaaaagtgaattattttgaatttgtgatggatcattaggataaattgtataacatgattgaccatttttaattgttgataataaatttttctttgatttattactatttgtataaatttcaattttatcattaggtttaataactaataaacatctaatccatttatcattaagaaatgggaatctaataacacaccattcttctttaatatttttattatttggtgaaagtaatgttttaatatcagaaaaattaattgcctgtgatgaaagtaatgcacctgtataagattcttgtaattgttgaaattcaaatttacaaagtaaaattgatgaataaaaattatttaattcatcaattgaattaaattggaaattaacaattgaattatttgtaattgtaacagttaaagttatattattttgattatattgtaaatcacaatcacatatgttaatattgatattattaccatcattaaatttaacagttatatcattaccagttaattctaaattaatcaatgaccaattatttgataaattatcagaataatatgcttcacctttataatattctcttacctgttgatatgaaattaatgttacaattggtaataaaacttcaggtaaatctttaacagatgaaataattggagcatttgattgtaattgagttgaatgagagaatgaacttttacgaattgaaggcttagtaaatgatgatgttgaagatgatgaaactttatcttgaactggttgaggtgatggaacaattgaaggtgatgatgatgatgatggttcagtagaaccactagaaggactagacttccccttagtttgagacttatccttcttcttaaagaacttaaacaatgccatttacccaaaggaaaagaacaacagatcttcaattaattataataatagaaacaggctggcatgaaaagtagatttttcgtataggcttttatttactttactttactttactttctattggcaatatgattcattctattatggtatttaacaatgatggtgttcctagactggtacgtagttacactggtccatcattgagagaggaacaatcacttttgaaagaattacataaaagagtacgtgcacatgatgcagagagtgtttcatcatcatgtttcttaacagttccaagtgaattattaaagagtaatggacctgatttaagagttatttatcgtcattatgcaacattatattttgttgttgttgcagatataaatgaaagtgaattaggtatacttgatttaattcaagttttcgttcaaattttaaataaatgttttaaagatgtctgtgaattagatttagtatttcattggcaagtattacagacggcattggaggaaatggtacaggcagggatggtaattgattgtaatatggataatataatgtcagcaattgattcaatgaatggtgtaaaagagagagaatattcaagatcaactttcttctcaagatggcctgtatcgtaattataggtgaagacatattaggatatgtatatggtagaagatgggaatgtggaatacggtaatagatagagatataatcaataccaacacataaacatgataaagtacattattcaattataactatattatataacatctatatatacaagataaatacctcttctaattacttctttaaagcttcagcttgttcctttaacttatccaactctttcatttgtttattatcagcttgttctctctcaagagcaactttatcaataattaatttaccacctgtaccttcccaaggattatataaatcaccagttttccaaattggttcattactcctggatgatttcttaacaatttccattaataattcttgttctctttgacgtaattctctattcttttcaacttgagctcttatttcaggactcattcttgataaaagttcctcttctgttggaactgtaaatttaaataataaaactcctaatccaataattccacctccccaaataacggaatgtttgatcatcatcatagtaggtgatgacattgtatatatgatatgttattgtttgtgatatatatacctctaaaagaagataatacttataaccatatacacttaataaagtcaaatttttattacataataaaccatgttgttttctctatttatctttatctttatctgtataacacctttttatacaaacaacagtatcatataggtaatgtcgtttggtagtaaacgattagatgttaataagatcttaaataagactaaagttagtaattatagtggatttttatcaaattcaagtattaattatcaaacaagtatattagatgaagatgaatttaataatgatggtatagacgatgatgatgatgatgaaattgttgaagttaaaagagtcaaagttaaaaagaggaagaaagataataaagagaatgatgataataaaaaggatataattgtaagtccaataaagaaatcacctgttaagaaagatccaattaagagagttactaagaaaaaagaggaaccaaaagcatttgaagaacctaaagaagttaaaaaggttccaaagaagaaagtgaaaccagcaaaggtaattaaagaattaaaaccaaaatcaactaaatcagttaaaccacctaaagccacaaaaccttcaaaaccttcaaaatcagttaaagaatctatatcattatttgaagttttagatgatgaagccaattcacaagatgatgaaatatttgaacttggatctccaaagaaaaaaccaaataaaccaaaacaagtaaagaagaaggttaacaaacatgaaatacccaaattaaatgaaactccaactccttcacgtaaaataaccaaaagaacaagacaaacaaagcaaaagaagaatgaggaattacccatagaatatgatactattgaacaagatgaacctgtttcaaaacgtataaaaccatctaaatcattaaagaaatcaaaacctgaagatatacaagatttctttgtaatggatgatatacctaatatacctaatgatataataacagaagacatacccaattcacaatctcaacctgatattaaaccaccaaaaaatcctaaaccatcaaaatcattacgtgaattaactaaacaaataacaacagaacctttaaaagatactacagaaactactaaaatcccattacgtgatgaaataacaacgggaagagcatcaatgttattaaggggtaaaagattaagttcaataggtaatggttttacagctataccacatgaagaaattccaattaataaattatatgaacatgttgatcaatcattacctgaatcatataaattaagacaattaattatttggataagtaaacgattacttaaagataatgaacaaatgaatgaaattataaataaggaaaaatttaatggtaaaaaggaagaatataaagagataattaatgagatgattaattcattatctaaaggatctattgatgttgattggtggggggaagaagttggtgaatataagagagagaatattcaaaatattagaaatgcaagtaaattagaatattataagaatcaaattgaaagattaaagaaagaggaggaagaattgaaaaaattagaaattaaaaaagttgttaaaaatgataataatagtaatagtaataatgataataaacctgttattaaacctataatacctggttgggaagatgatattgaacgtgttgaaaaaatatataacagagttggtaaattagagagattattacatagatttggtaaaagtaaagaagttattaatagagttatggaatataaagaaggtattattgcacaagttattagggatagttgtgattatgatgttattgaaatattaaaatcattggtatagtataatcatttattataagtattttttagctatatttttaacccttgtagtgaaaaattttgaattaattggtgaattataatcataaaatggtgaaagtaatttctttaaatataattcatttaattcaataaagaattgtctaatactttcatctaaatttttactattagtaagtattatatatttaatattactttgagttaaaaatataaatgttgaataaccataaaatgaatcaatattattaaaataatgttgttgtgaattaaattgaatattctctaaaatatctaatgatgaatttgcaataaattgttttaaattatttatattatcagggaatttaaatattccattggaattttgtttatatgatcctatatccaattcatatactggagcattgttactacctattatagtcaaataatacgacattgattggatacagtaaaagaagagaaaactgtattatagttaaagcatacagtttttgcgaaaccttaataaaattcatgtagtctcttatttatggatctgcttctatattcattttatctttttcattgaagtaatgaacaatactaacactaatgaagtaatagatcctagtactagtagcacaactaatagtataaagggtaaagaaacactttattcgatggaaacaacggatttacttaatcatcgtataaaattaatggaaaacttaagattagataaggaacaagagaaagaaaaggacaataacaatgaaaaggaagttaagaaagatattgaagatagagcaattaataaggataagaaaaggattaatggtggtggaattatagatgatgaacctatcaatgaagggtatcaattaatgattgaaagatatcctacattaagtgttaaagaatataataagattttcaaaagagcacaaattgttaaatcatatctgaatacatattatgaatacattgaaaaatatgaagagatacgacatccaaatgaaagtaataaaactactagtatatatgaaggagttgatggagtttggaatccattacaaattatgcgtaatcgaaggttaagattacatagaggggagaaattaaagaaagaaggtgattggaggaaagttcgaattgcaagtagagttttcagtaaacatgagaaatctagattaatttggcaagttggattacatgaaataattggagatttagaatggagagaaggtaaatggaatgatttaagaggtaaagatggtaaaagaattttcaaaaaggataaaggtaaagataaggataagaaagaattaaggaaagttttgaaattatcaattggtgaacaacctataaagaaaatacatgataaattgtttaaagatgatgatgaggaggaagaggtaaggagggtaaggaggataaggagggtaatgagaatcatcataatgaagatgatgaacttgatggtaataatgatgttaataatggtggtaatagttataataatatggaagatgattattttgagaagagaggtagaaatattcataatagtataggagataatcataatgaagaagatagtagagaagttgaagagccaataattccggttgttgagattgataatgttgataaggatattaatattgaagaagttgttgatatattaaacattgattccagtatttcatcaagtattgcccttaatgaactgtcaatgtcattaaatgcagaaaagatgttaatgcaagtaaataaatggtcaacacttttccaagataagatgttaagattagatgaattagagaaaattagtttaactaaatgttccacattacaaaatattattaatagttgtgataatatattagaaacacagaaacgagatgttggattacaatctgctgcagttgaagaattattaggatattgtagtagaagtagtggtgcagttaatacaggtattacattacatcttagacaattacatgaaagagcagattcattagcaagtggaggtaataataatggaggtttattatctaaaattgttgaaattacaattgttggagcactttggatggtatgggttgttgttgaaatttggttaggttgtaaacatttagttgtttcaattgctaaaattattaaatggcttatattctaatagatattttatatataaatttatatagactaattagtaccagtactaccgaatccaccagcacctctttcagtattacatacattttcccattgtttatcatctaatacaacaacatcaggagtgacaattctctccaagattaattgagcaattctatcacctttattaactgtaaaatcaacatttgaatgattaaataataaaactttaacttcacctctataatcagcatcaacaacacctgcaccggtggaaatacctgccttaacggctaaacctgatcttggagcaacacgagcataagtgttttcaggacatacaactgctaaacctgttgaaaccagaacgcgtccattagctggaactgtagtgttttcagatgcatagacatcgtaacctgcagagaggggggaacctctagtaggagcagtagcatcggcagttaagagacgaacagggaatgacattgtagatatgtatacttgtttaaagaaagaaggtagtggttattaaacgtagaagttgttacacgttaaaattttcattgactttatatattaggaaaggtctttcttttaaataagagtctttatttacattatcaacaatggcaacaccattatatggaggtgcaatcactgcaaaactacctgcacatctcttagatgcatccaatgcacgtccagttccagatagtcaagaagtttgggtatctgatcataatggagttatcattgatttacttgaatgtgtaaatggtgataataatccaatgaatacacatattgaagaaatggaacgtttaggtggtagtaaattattgacagatagtgaaaagactataactgtaaatgaaccattggttcaattagctattattagaacattccctaatgttgaacgtcaatttcatttaccatcagctgttggtttacttagattaaaatcacctgcagatgtcgatgtactcatcactctaacaggtgtatgggataaccctgcaatggaattagagtctatcctacaatccttccatgttaaggatcaatctctctttgtataatacagtatctaccttatataacagtttacgtaatttattaatgattaatataaaacatcaattcttcctatgaacaacatcttctttctgtgaagcaaatggcatcggtcaatactacactgttccctgggtactccccctcttgggatgatcgtatggatatgaattctggttttatacctgttactgatgatgattcattattcttttggtcctttcatgctaaaaataattcatcatcaaataatttatcatcaaataattcatctcgtccattagttatatggcttaatggtggacctggatgttcatcaatggatggtgcattaatggaaattggtccattaagagtcgttgatgatacaacaattaattggaatataggttggtttgaaagatcagatttattatttattgatcaaccaataggtacaggattttcatttatgaaatcaaattcaaattcaaattcaaattcaaataattttgatacttcacttgaacaatcttcattacatttattaacatttttagaaaattattttaataaattcccagatcaatataataattataattctttaataattgcaggtgaatcatatgctggtcaatatatacctcatttaactaatttattaattgattcacctcgttttaaacataaattaaaggctattatgttaggtaatgcatggttagatcctcctttacaatcattatcatatataccttttgcaattgataatggaattatcgatattaaatcacctgaacaggaaaagaaagttacaaatttaatgcaattacaacaaagttgtcaaaataatcaaaatactgaaaattcagctaatcaaatttgtgataatatcttacttaaattattatcttcattatagagatcataataaatgtattaatgtttatgatattaataaaattgataattatccagcttgtggtaataattggccagaaattttaccttcaacaactaatttccttaattcaccaaatgttaaatctgctttaaatattccaattgaattaggtaattggaaagaatgtaataatgatgttcattcacattttacaactgataatgataaaactggtgcagaattactaaatcatattcttaataatggtattaaagttaatttatttagtggtgttaatgatatgatttgtaattatttaggttctgaattagttattaaaaaacatacaattgattaccttaattcaaataatttatcaattattcatcaaaatgaaatcaaatgaaaatgaaaataacattaatggtataacgaaaagagatatcgaaaaatttcaaatggataatcaatggtatcataatgataaattatctggttctatatggaatcgtgggaatttatcttatattcaaatttataatgcaagtcatatggttccttatgatttatctgaaactagtataggattactggatttaactttaaatgatgatattaaaactcatacttatactagaagtacaatacctaatgaaaataatgaaaaagaaaataaggattcacatagtaggaaatcaattgcaattatattactttcacttatatttatattgataatttggtgttttttataaattttggaaaaataaaagaaattcacaatattctgcattagctattaaaagaaaaaatacttattcaagatatgcatatgaatggatgtcaggtaataaggggaagaaaaaagttcattggattgatcttgaaggtggtgatggtgatgttgatgaattcaatattgatgatgatgatggtggtgatgaattcaatattgataataacagtgatttcattgatactcaattaaatgaacttgatacagatgatgttcatgagaataataatgaattagatgatttgaatccaatccaacatactgataattgatgtatccatccttctacctctagttgtttatttatacctgttatatgtactctctgtaatgtttacaatattaaaagacttttatagttttactgcgatcattaagttaaaaaaaatatagccgatattagaagtattatttagattattacacagaatgaagaaagaagcatgttataaagatgattttggataataattcttcttttattatctttttattttatttttattattatcttttgtttattttatttttttttattattatatttataattattttaattaaaaccaggatattcaattatcaatgttaaagaaaatttatcaagtatttgaaatttgtatttattcctattatgaatcaaattagttgtaacttcatttgtatcatttgaaaatatacagttattaccaccacaatataagccatatataaaaaataaatttttgattcaattagttggaattatttaagaaattttcaaataatctagaaatgttttccaaattcaatctcaaatttcatttgctttttcagataatgtaaatgttgttgttaattttggtcttttaggaattgattgttttagaagatttgtcttaaaaattgatttaataataaatgaagttatcacttactcttgtgtgagagtaaaatcaaactgataataaggtcaaaaaaattagatttaattgttcaataattgtactgttattgtaattactgctgttatagattgatactattataagataattaatttaaagttcatattggattttttttgtaaatggtttttaatagtatctaacaggctttcatcattggaattggaataggtattggtattgaaattttcaatggaatttgtgtaatcatttgggctaacagtacatttattgttctcatcattggaattatcatcaatggaattatttaaattaaatctaatctccccgacattattatcaatttcattttcttcttcactaatatttaaagttgaaagagtagcaacacttacagcatcattgaatattacaattagaaacaggaattggaattgttcttaatattgttcttattgttatttaaattgttcattttattgtccttattgttattaatgctcatattattggagtttctaattgattcaatggaatttaatttattattattttcaagtttttcaacaaattcttctaaaagttttaaagctgtatcaagaccatttttaactgcatcatttacattttcatttaaagcaaaatcatttgaaatcttcatttgaattatcttctaatttatttgaagattgattaaataaacccatcatattgtttcttgacttatttcccaaaatctcatttgaaggtttcaatttcataatcatcatcattagcaaaaaatacattttcttcctttgtaaaatttctaaaatcattaattctattggttttcttgaatttactattaatcatactttctgaatataatcaatatcaggtattaaaataaacatatctttgtttaattaaagaaaataccttcaaaacatttttacctttaatatcaaaatcataaacagtagatacatcatcgttgttcttattaatattaattttattattattatcatcatcattatcagttgaattcttgaaaacagtttcacttaaatcatggtcagcatcatcattatcagttgagttttctaaagcagttaccagttgattcatgatcagtatcattatcattattaggatgatgatcaattataacatcagattttaaattaacttgatcatgcaattcttcttaaggcatcatcaattgcttcaggtgtcattgatgaagtttgatattgagtcattgatctttgacttgagtaaagtttatgttctttagaagtaatcgaattattaaactgttcaattaataaatcaatttcatcagcttctttaatacatttctcatcacttgattgaggacgttttaataatctaacactcattttaaaagtttcttcagttttctctgctgcataaatattcttgaggtaataattgatcttaaatccatttcaacttttagtgtttttttgatattaaaacagtttctaaatttatgatgtttactaaaatattcaatttgaggtctaataacttgttttaaaaatctgctttttaattctattaaaaaatcatttgagcaaggaagtgtaaatggtaatctgcatttcttaccatttctttcataaacaaaattatctaattttgttttaaaatcaaagatattcagggttaatttatagaattgaatttgtgaattatctaaagcatcataacattcttcaatccaatttgaatcattaaaaaattttgatttgatttcaactaaatttttgtttcttctaactattgcatttaaaacttgaattttatcactagtatttaagtttttgttacgttcattaacacctaaaaatctcaatgcagttgatggtaaaaattcaacaatttcatctgattcacatctaactttctgtgaagctttccattcttcaaaatcttcaagacatttaattgggaactttgttttttaattttttcaatccatttatctaatctagaatcttcattcatatcagatgatgaaatttcttcttcattaccatattttttgtataatgattttcttaaagttttctcctttttcatagtgaaaagtaaggatttatttctaataattgaagctgattcaagtaatggagatggacaaataccattatgaccagttaaaatagtacgaacaaaagttgaataatcagcattaccactcatttgatgtaaataaaaatcatgagaataatacatttcagcagtttcataatcagttaatgaatatttaattttataattaatgaaatcatcaataattgataaattaaatgaaggttttgaagttgatttaacataaccttttctgaataaatctaaatctaaataaggcataattggagaatcgtcctcatcgtaagtaagtataccccttttatactttaattttttttccttggaaagaccataaaattcatcaacaaaagaataataggtattcattgagaatctccataaaaattttggatcatctaaatacaatttaacttctctatcagttgcttcaaacatataaggttgaacattgaaaaatttagatttaataaagttcatcttatgtttattctttaaacagaagtaagttaatgaccaagtgtaggacatatacttttgtcttttgataatagttcttagcagttgcttccaattcgtctaaatcaaagccaaaatatttagcattgaaagcttctaaaatttgagcagtaccaaaaatagttaaggtagttggacaaacatttgaagtaaatctatcttcgataggatgtttttaaatcaggattgaaacacattttttaaactaattgatttttctaatttagattggaacagtttttaaaaatatttgaacttggaatttactctctaacttttaaaactatagggtttaataacaggcttttgcgctagttgttaaagaaaaaataacaaagaaaaagtaaaaaaacaggagaaaaaggataataataatgagtagaaacaacaagagaaaaaggaaactcactataaaaaaatccccaaaaacccaaagaaaagggcaatgaataagtataataatgataataataaatgaaacgataataaacatgaaataggggaaagtataacaatattgaaataagtgatccttaaaatgtatccttgtcatcaaatttgtttatttttcattaaaaaaattggtggctcaactttttccccgcgatattatctttttttttcaatttttatgagaaacggtttactatggtgaaattttgtgtatatagtgagctgagcctgaagatactattgtataatttccagtgaagttataattgaatagatgatctaatgcatgatttatgattgtaagatcataagagcatttgtaaattacaaatactcatggaaataaattaagatttcgttatatttaaacaatttccaaatttatcaaatagtgcatattttatttcttattcataattttttgttctataataaatttataataatccattactttttcatgtaatatatcatcaattgatagtttaattaacgacattggcgtaataaagaaaaaagaaataagatgaacaaaaaccagtaaaagttaaaactttgaattgttgtttttaatttcgccaccctcaatgagaaacaagtattacgtaatattttagatatattatttcacccccttattatacaagttaataatttgcatgtttaattggttcagacactctttgggagattcaactctagtcattaaaaataactaatcttgttaaacactgatgtaaaagtaaaaaaactaaattattaaatgtagtattgtcataaaatcccagttatcaacactcatataagcttaaattattacaaaacttttttctcttcttatttactgtgtcaatacatcttaaaaactgatagattacacttttaaatcaaaaaaggcattagtatttatcaacatttttaaattttataactctacaatcattttttattctttgactgttttataaaaattttaagttacaaaacacactcaaaactactacctaaaaactttcaagtataaaaaatataaaaaaaaccttttaattctattaccgccctttcaattaccaaaaaacatacaaataaatttaattggaagtcacgtgaccacaatacacccttaacatagttacccctttgtttgaaaaacttacaacaagtccgagatagtttagtggctagaatttccgcttgtcacgcgggagaccggggttcaattccccgtctcggagatcaatttttttactcccatttctgtcttatcttcccattacattctcttaagcttaaattcgttatcatttttattataattatcgtaaataaatttaaatcatataaaaaatcttatacacattattattgttcttcatgctcttcattaatcatatcattaacgaaaacttgattcatttttgaacctggtataataccaggtgtttgaggtaatccaacttgaccttgcgctattgataaaacattattattaccagtattattattattattattatttattaatcctttaatatctaatttttcacttaatgttttacgtcttctttgtaaaattgattcatcaacttcatcattattaatattaatttttggtatacttactatactactactactatttttattactaattggagtatttgatctattattatttaatgtattaattgaagtatttgatgctaatctattaccatttctaataattgaagcttgaactttccttggtgcatatgaaaaataatctccattaattgaatttgctgaagttggtgttaaatttggtgatttaatatttgaatgtgatatacgtgatctaacttggtgaattagctcttgaactagttcttgaatttggtctagagttaggtctagaattaggtcttgaacttggtcttggcgaaacaattgatgatgatgaattttgtctaattactggcattgatttaacacttttaaatgcaatatttgatgttatatttggtaatggacttaaattaaaataatcatcacttggtgaataatttgataaaatactgggagattgtctttgaaattgagtattttgaaattgagaatttttaaattcatcactaattgatcttgaatgtgaatgtgataatggatttgaaattgaattcgaaattgatgttaaatcactattatcacgataatgattacgaccacgagattcttcagttgataatttttcaaaactattattcaaatgattaacattaatataactttgattaccatcatcagattcagtttcattattcatctgttgataatcaagagtttgttgttgttgttgttgttgttgttgttgttgttgtatctcatcctcctcctcctcctcatcatcataagaattatttctttgaattatatcactaaattcagttaaatcagataaataatcaacccatttaattgttgtatcaatatcatcacatttaaaagtatattttgatttagttgaatcttttgaatcatttttaaaaattctaattataaattttttaggatcattatcaacagttgaaatattaatttcatttaatggatatgattgaattggatttaaatctttaaatctatcacttgatttaaattcatgtaaaaaattaattgttaaaacataataaaattttgaataattttttcaaatatttagattttcctctctaaataacctgaaaaaatacatgaactaattatattattcttataaggataattatatcagaagttttcctaatatttttaacttttttaaatgtatcatttgcattaacattaataaaatttttatttttatcatttttaatgaaaaaatcccaatcaattgttggttcatttttaataaatccatctctaaatggattaattaaattatctctaactgtatttaattcagaatcaattaaatcagtataagttgaaatacatgattgaatttcactatataaaattttctctaattgaacagattttaattgtaaatcataataaatttcctttaaatgagcttcaatatataattgatctttcaattgtaaatcaatttttaattttaaaatataaggatctaattttggattaaattcattatcctttaaattaattgttgtacctaaacttgtctttgaatgaccagttttcaataattcaattgatgaaatataatcagataaaattgcaccagttttagcaatttcaatttttaaatttttagttttaaaatcaggagaatttttaattgaattcatttgtttaattgtttcatttaattgatcttttaaattatctaatcttggaattaatctatttgataaatgttgataagttgttaattctttttccttcaaattcatatgattattgaaaaatgttgaagatattgataaaattgaattatcattagctggtaaaaaagttgtttgtaataatttattaacagtattttgttgatcaaaattaaattcttgtaaattatttaaattatcatgtaaactttcaaaactacgagaatttgttgttgttgttgttgttgaaggttattatcagattgatctttaccatcattctctaaatttgttgaagataatgattttttcaaattttattactatttgcttttatttttaatttaccagaattttgtcttcttaaaatttctaaattttcaatcattgccttattaccttgataagtttgacccttaaatacacacatttccttaaaatagaaaacaatttgctttataatcattttccaaatactaaatctataaattaattgatcaacgggtcttggatcatcaatatttttaaatggtaaataataaggagatttcggattatcaggtggtaaaactgtttgatttgtaaatctcatatttttcttataaatatcatcaagattgtacattccttgattgccattgccattgccaatatttccattaacattactaattatactataagcatcattaaaagtagaatttgaaatatttgaaatagatggatgtaaactattactctgagatgagtacattgacctattatcagattgattactcattgtctagcaaaggaaaagaagtaaaacacttaaaaaagaacacaggagagcctccggatgtattggaatttagataaagcgccatgtattaaacaaaatccttagggacgtttctctccctttgaaaaattatttttagtattatgttaattacgtaatagatagtatagagggacttgatttgattgatcagttgttaatcagttgttaatcagttgttaatcagttgatcaaattatataatataaaaagaacaataaacattatttaataaaataaattaatttaaatttaattaatttaattaatttaattatcatcattgttaaataaattaccaacatcagctggtaattcttcaattttggtattataaaacatttcaatttctctcattctattaatatctctttcagataataaattaattgcgacaccttttctaccaaatctaccagatctaccaattctatgaatataattttcattattatcaggtaaatcataattaataacaagtgaaacttgttgaacatcaatacctcttgctaataaatcagtacaaattaaaattcttgatgaaccagttctaaattctgccataattctatctctatcttgttgagacatatcagaatgaattgatgaaactgtaaaatcttgtttagttaattcttctgttaacatttcaactctctttcttgtattacagaaaataactgcttgagtaacagaaattgaatcatataaatcagttaaaaccattactttatataaatcttcttcaacattaacataaaattgtttaataccttctaaagttaattcatcctttttaactaaaattctaattggatctctcataaatttagttgtaacatctaaaacatcttttggcatagttgcagataaaagaacagtttgagtagtttctggtaaatattggaaaactttataaatttgttctttaaaaccttgacttaacatttcatcagcttcatccataataaacattttaacattttttgtatcaaatatacctctatcaataacatcgaaaactctacctggtgtaccaacaacaatttgtgcaccatttcttaaagctttaacatcatcttcaattgatttaccaccaatacaagcatgaactgtaacatttaaatgtaaagctaatgaaacgacaactctttgaatttgtaaagctaattctcttgttggtgccataattaaagcttgagttgttttttcatcttcattaattctttgtaaagcagaaatagagaaagtagcagttttaccagtaccagattgagcttgagctaaaacatctctacctgaaacaattggtaaaattgctctttgttgaattgctgaaggattttcaaaaccgataccataaatacctctaagaagatcactctttaaattcatttgatcaaaagttgcagcaacttcatcataattggtttcaattgtaccatctggattagttaaacctgacattattaataataggaatccttgataaatgaaaaggggtaagtctttctctattataaaattaaaatttttttatattgaaaaggcggtaatgttagtaaatttggaaaaaactttttcaaagagggtgatatccgggtaagtttggtattggaagtagtaagggaagttctaatagatactacactacatactagtagatactacagtataataataatagtaatagacaaatagtattttaaattaatataaaataatatgtaatatgtaatatataatatataagagtaaagtaagtcaaataacaaacttaacgagagtaagaccaaacattatttaataaaccatcattttgagctaatctattaatttgatcatcagcttcacccttttgtctaataaaacctgagattgcataagtagtatttgaatctggaattgctctaccttcttcattaacattagcaataactaattgaattgaagcatgatcctttgctttaataattctgttagttgcagaacattttcttggaatatataattcaactaattcacccttatcgttctccatttttagttagttacctaagaaattaaaatacaaagatttaatttaaaaccaaagtaaaataaaataaaataaaataaaacgtataccagactaagtgaaaatgaagaaaagggtataatagtagtatggaaaattacaagtgaaaaatttacatagtaaataatttattattattattataatatatctgattaggtaatccataataatataataggaaacttatattacgtatattatgtaatcaactattactatagtagttaatttttcccataataattataattataatcaataatgataatttatcattaaagtgtgcgtccatttaatttccccctaattagtggtgcgaggggtgtgcaagaatgtgtgtataaaatgggaaaaaaaaagtactttgcatcacataagcacaccctcgccctctgcacgtgactggttattcccacggaattaaactttctaaaatttaagaatggctttaacgttgattttccccttttcaaaagaaggcttttagatttaaggctcatttactgattctatcatcatcatcatctttatctttacctttctgtgcaaatgaatttggatattactactgatatatcagatttagatatagataatattcaattgaaaaatacttcaaggcatgatgtcggtttattacctgatgattattataaacaaaaattatcttatcaaatttacaaaattagaagttatctattacctttaattaattatgaattatctctattaaaatacattcaatcattccatactcctttccttacatggttcttcatattatctgctaattttggttctcatactttttatgtcctaatgttaccattacccgtttggattggttcaattcatttaactagagatttagttattgtcctaggtttaggaatttattttactggatttattaaagatttactttgtttaccaagacctaaatctcctcctttaaagagattaacaatgagtcattatacttcacaagaatatggttgtccctcttctcatagtgcaaatgcaatcgcagtttctttagttttatcattacatatttatcattcatcattatcttcaaatggtaaaattattttatattttttacttatttgttactttttaacaatgttaattggtagattatattgtggtatgcatggtttagttgatgttataattggttctttaattggtgctgtaattttcattttaagatatttaactataaattatcatgatattctcatcttaaataataattcattttgggtacctattatatttattacaatttattattcattaatttatttccatcccacaccaattgatccttgtccttgttttgaagattcaattgcttttatagctgttttaatgggattaaatttaggtttttggtcaattacttatcttaatggtcccgttatatcatcatcttatgataaattaccattcacaaataattcacctttttcaaatttatctaaattaggttatatttataataatcattatgctaaaattgaattaacttcagatccttttaaaatatttgctagaattttaattggtgttatatcagtacttatttggaaatcattatcaaaaccattatttacattaattataaatttaataaggaaacatatctttaatgataattcaaataataaaagtaatgtatttgcatttatgaatcgtaatgatacaagaattttagttaaatatatcgtttatgcaggtatttcaattgtttcaatttacttaaaatatttatttgatttacttaatttataaaaaaaaaaaaacacaaaaaattgtataattataattaaataaacactctctgtactattatttcattaaatgttccttaacattttctaatgtaatctccttttcatcaacttgttgaatattatttaaatgtaatttactactaaaatgttgtgataatttaagtgaatctttatatttcctattacataaatcacatttaaaccattcattaccaaatactttatcattaagtatattttcgatactacgtgaagtaaccactttactatccttatctactttacgtatcttagaatactcttcaacatcccatgttttacgtccatattgattcttttccataccctctaaaaagaagtaggtacattaagattacataacaaatttttcaatctcggacttcttacatcatggaatccttcattttacaatgctgttttcaccgtatttatttgcttggagtcattataatcctaaataccataattaactcttatctacatgtattgatcataatataccttcaataacattagcatttttagttaataataaatatgatgaaattaatgattggattgatgaaataaggcaatttaataataaaattaatataagattaagtattggtggtgcaaatggttggattaaggatcaagggcaaacatgtgaagaagtttttgagaaaattaaagatttgttacattaggagtgggataagagaaattgatttagatatagaaggtgaagtattagaaagatgataagaagattgaagatttgattaaaattgttaaattattgttaaaggaaatggaattagtaatttcattaacattaccagtagaatttaatggtggattaaatgaatttgcaattagtactatttgtaaatttcaacaaaataagaattaatataagatatgttaatttaatgttaatggattttttcactccatttaatggtgattggtatattaaacatattgaaataattgaatacgtttatagaaaccaattgaatagtttagggattgattataatccatatgggtatttgtccaatgattggagaaaatgatgatcacacaaaatttacattaaatgattggaatcatttattaaattttgcaattaggtaaaaatatagggattaattacattttgggcaattaatagagatcaaaagaataaaggtaatggattaaaattttggaaatcatcaattaatacacattctaattgtcaagataaggatttattatatacagaaatggttttaaataaattataatgaaacccttaatttttagataatttatttaatctagtaataacatcttcatctgtttcaccataatatctaattggttggttcaattgtcttaatttatattgtgccttttcaataactggtgcatcatttgatggttcttcatttgataatgtatgtaatttgaaaactgctggtgtagtggattctttattttcaatttgtttatttgttgatatattttcaataattaatggttctaatttagatattttattaatatcaataactttatcaacagtttcaaaatattgaattatatcatcatcatcatttttattattattattatttaatttaattaacatatccttatttgaaatattttgttcaaatttaattgcttctttaatatttggtggataatttaaaattataaatctacccatttttgtattaatttctttaattttcaatatttgatcattaataattgatgtgaaaatacctggtttaagtttatatgagaaattatatttaaaagccatcattattttcatcaattgattctaatgtttgattaagtaatatattatacttacctgaattattaatttgttcattaactaattgatttaaatctaaaatactaacatattcatcaccatcctaatttatcattcaattgattaattttcttattattccttccttctttattagcaaatggaattaaataacattcttcattattctccaatgttaaatgtttcttttgaatttcactaatatattgattccattcatcttcactgaaagttttcttatatttctctaaatttttactatgatcttgttcttgaattctttgcataacagttatataaaccattgtaccgaaaacaccaactaataaaaaccatttgaattgaattttatcatcagttttaccctcattttgccatttcgatgaatatcttataccacctactctaggtatactcttaacactcttccatggtctaattccatgtccatagggtctaataatactacgaaacatctttatccagtaataaaccatccattgattgaaagcgaaaattcaacattttcttaatttcttccattttccaaatatttcaccttgaagtacttattatacttcttctctaggaacaatgtctattgtatcattagctaacgtttgtgcacatttacagaatgtatcgatggcaagagctccacttgcttcaataccatataccagacttcatttaaatatagcattaggattacataaagagggtttcatatcatcattacagagaggttcacaaaatggacctgatattacaccagttgaagttacacctgataatatttcaactagaagattatggttaggtatgaaatatagacaaggtaaaccagttttatctaaatttcaattaatttctaaagccaaatagaagagtttatgcaaatgcagaagatttacaatcatttgcaagtggtaatcgttttagatttgttaaacctgttatgccaggtgaaattgtatttgttagaccaagaggttccaaggaagttattaatttacatgaagctgttaagaaacatgtagatggtgaattattatgtagagtcttctaatagttacatgtaaatatgacctatattcttgtataaattgaaatttaatttttttaaactgtggtgtctaatataaaacgtggataatattattatgattctttatttacatctctttctttaagcaaatgctaccacatacattcaacgaacctgttccattagccatcattggtggtactggtctttataaattagattcacttaaacctgttgcaaaattaacaatttcaactccatggggtcatccatcatcaccaattacaattagtaaaacttcaaatggtatgccaattgcatttttagcaagacatggaccaaatcatgattatttaccaagtgatgttccaaatcaagcaaatattgcagctttaaaatcaattggtgttaaaattataattgcattctcagctgttggttcattacaggaacatattcgtccacgtgattttgttttaccaaatcaaattattgatagaactaaaggtattagaaaatcaacattttttgaaaaaggtttcgttgctcatgcaggttttggtaatccatttgatgataaaattaataaaattatttcaaaaaattgtcaagaagttttaattaatgatgatggtcataataataatgataaacatattttacattcaaaatttattgaaaatgatggtaaagatctaacattaatttgtatggaaggtccagcattttcaacaagtgcagaatcaaaattatatcgtatgtggggtggttcaattattaatatgtcatgtgtacctgaatcaaaattagctagagaagctgaaattagttatcaaatgatttgtatgtcaactgattatgatgcttggagagaagatactgaaccagttactgttgaaacagttgttggtaatttaactgcaaattctaaaaatgcatcatattttagctgaaaaattaattgaaattttagaaccattaattaaatcaggtgaaattggtaatgatttaactggttcaatgaaaatgtcaatttcaactggtccctctggtagagatccaaatgttttaaagaaaatgcattatttattcccaggttattggcctttagataatgatacaactagatcttaaatattctatatattatattataatattctttatttaattgattaataaaaactacgattagagtttcttaattcattattaacaccatataaatatttaccacttggtgaaatcatttcacgacgtttttcattaaacatacctgaactccatgttgaattaccaacatcagtgttaatattatattattattattactattactattaccacctcttaaaactaaattatttaatcctcccattacatcttcaatatttttactatcaggtatagttattctagttggtttttcaattggtatttgtgaagctaattgcattttttgtgtaattgattcaccattatcatcatctaaattatcttcaatatcatgaattttcatcatctaatcctaatactttcctttgtgatttagttaatggtaaatctaaacatctatcaattggtttaatcaatctataaatagaatttataataatactaattaatataatttgaataattgtttcactatatgaaaaaaattttaaaatattttcaaattcaataatttcacttaatttatcaaagataaaatcaaatttatcattaacttttaattgacttaccattttagaaaatttgttaatagaattaccaataattggatgtagtataaacaaataattttataattgatttgcaaaatctaacaattaaaataattaatgaacaaatcattaatttcctaatttcatcatcctttttaacaattctaccaatcgcaactttaacacaatcatcattcaataataaattaacattagtaacattattgacatgtcccttactaatagactctttactattaccattattactaccaattttacttaaatctgtaataattttatcacttccattctattgccatttccatttcgtatatgaccaatatctttattacgtgaaaaaacactatgagaaaatgcatttatatcataattaccctctttccttattatttttattaaaatcattataatattcattttgatgttgtttaactctttcacttaataaagatttcttatgattattacttttatttggtgtttcaataagtgatttaatatttaaatatggtgaaattttattgatttcaggtaaattaatactaccatttatagttgtatcattatttatagttgaattatcttgtgttgtattgaaaaatgaatatgacatttgatggttggtaaatgaaacagtgatattaaactcttaataataggagaaaattaattttttttcaattcatgtagtgagaagggattgccatgttctcgctctttttgttatgagaaattatattggacgggcaggttggaattggtttagtattgctgatgtatttctttacggtgtgtttgtacatggtattagatattactatagttagatagagtaaggaataatgatgattttgatatacatcaaggctatattgttatgatgtttgataaagtttaaaaccaaaattaactaaataggctactttttaaactttttttttattaaattttaggttcagtacttttgcaaccctgataaagcgttcaaaacatttaaaatccttcattttgcgggtgtcacgtgcaaacactataacataattaacatcaaataaaaacccaacaattaagactggatggccaagttggttaaggcgtgcgactgttaatcgcaagatcgtgagttcaatcctcactctggtcgttatatttttttataatttttatttttttttataagacttcacaatacttctttaaatcattaaagataatattgtaacatcatttagagtaagtttatgtatttttaaagagtgtataattttttttccttacttttaaaatataaaacataatataaaagttaaagaaatgaaataattagtaaagaattcataaatacaattattcaatgtcagaaaaaagaaaaatagaaatctataaaataatgtagtgtaaaagggtattcgtaaatatgtgtgtataggggtataataataaattgatttaataaccacaatattgtttaattaaatcattcaattctctttcttccttcattgcaactgattttcaaataatttgataatggagtatttgcattaagtgaatttaaagttttattcatattaatattagtagtagtattcttagttggtttaacaaattcttcattaagtgattctaatgaagaaactgatgaagatcttgaatggattgaagaatttgatgaataaattgaacttgaaactgatgaatttcttgaatgtaaagaagaagaagaatttgataaagggacattgttattgttatttggaataacaattgtttgagttgaaccagcaatcataccctttgaaagagaatttctaattcttgattgtttctttaaatcatttttaattggatctaaaaatcttttccaaagataaattaattgattattatcaattgaaacatcccaatctaataacattaataattgtctttccattaaattaacatcttcccttttaaataaaccatcagtatattttgcccaatgtttattttttggacttgaatcatttaaattttttgaagcaataattaaacaagcaaggaaaattctatgtcttgtacaaggtaaaccttttgcatcttttggtaatttttcctttaatctattcatataaacaattgttgacattaaagtacctgtataaacatttgtatatctaactaatttagttataaaagtcataagtgaaggtaaaggttttgatcttacaattggggtattatttggagaatttggtggtgaaggtaaagtttcagtaattgtctttgaattttcacaaggtaaaatttgtaaagtaactgaaactaaatgatgaatcatgtcttgagtgacaggtgaattaaggaaaatttgcattgcttgtgagtcagacattgtgtgatgtgatgtgtgatgtgatgatatgtgaagttgattgtttaaagaaaagaatagtataaatgataaattataatacaaactacatcaaagtaaaagaattgtgggaagttaagtagatttaaataaaagacatgaaaatataataatcaggagaatgaaacacggttggagatgaatatactacctaaaagggagttaatgataaatattggaggcttaaatgaataaaatgaatagaatgaacaactgtcaatagaagataatacaatagattcccctgatgaaacggttctcctactgttataaaagtctcgctataaaagatttatctccttcccttgtgacgtgtcgcgtttgttatgtttatagagggaaagcgcgtttgctttgtttaccttattttattttattacgtgtcgcgtttgttttcatttcgtttttggtttttgtttttgcttttggtattacgtaagtgtatatattacataatcatcgtaccttatctacttcttcttatcatcatcaccatcacttttactcaaatcttccactgggatatactttatatcttcaccaaggtctccaaggtgtatactattctctaatccattaccacctgtataataactttcttcaactgattcaattgtttgattacttattaatttattaacattatttaatggtattgatgatgttgcattgaataatttatttatatacgctggagtaatttgctcctcagcaatactcatcgtatttgatttacctattatattatcatagttattattgtaatatccttcatgattactgggggtatttattgatattattgtattactattagtattagtattgttatcattagtatttgtattggtattgctattgatatagtaattattataattattattataattattattataatcgttatcatcataatgaacattgttatatccgtaatatccgtcataaattccattattattattattacctatactatgataactcctatattcttcactatacccataatcatacctattctgttcaaaaaattctctctcaatattcctacccctatctattcgatttgtattctctcttgaaattgtttcatttcctttatatgcatatggatttgaattactatcagtgtaaactatccaatcattggattcaatactatcattatcctcgtctttccctatatgtttatgtttatcattatcagacataatatagtgatactaacccatgcagtagatatactatctacagagaattttaaccttataaggaataataattactaataaaatcagtttatccgtaaatttttaaagatcactgggccatataacattacgtaattttgagcatttatttatttatttattatggctcagcctttagaatatcgatttcattctttttttctgcaaacatcctctaaatgacttctgacaatcctgaactatgctacgatggcgagataatatatgattcaaggtacagtgataaccatcaatcctgattttaaaataaaagataacaaactttactaacattaataaaaaatagtaatgctatttattacatacagtggtcgtgataatcttggcagacacattttcataaatcattttcattatatccataaaaattttttaagattttatccaaataatccatattttcatcataaactcataaacttcttagttgctgtatcaattgaagtaagaatttcatattattttgttagttataaaacagttagaaaaatattatatgaaacagcaaaagaattagattttctttctcatattccaaaggaagatttaaaaattttaattaaatattcaatgtggttttcatgtgatgttatttctgaggatgaacttgatgaaattatattgggtgaatcagatacagatactagttcaataacatctcaatgataaataatcattgattaatattagtttgttctttgtttagtttaaagtgtaaccataaaatatgttttattattggttacgtgtagcagttatttagttattaactcttttccagttgatttaatttcaaacaattctattggtaatatctgctgaaataacagttagagataacttaccttatcgatggaaatttcaaattgtaatagacaaaacgcgtatgaaatacgaattgtatgattttcacaaaattactatgagactagtttaatctcaattttgaaaatttcctaattgggtagtgtcaatggaataatcagcataaaattaaaatactttacgaaacatactccataatgattcactctccctttgtactatattagttctctgtggtataccattataacttactgcatcatttaatttaatttcctttatattatcatcatctccacgtaatgatcttttaacagctgtaatcaataatggtgcacatcttttataacatgaatttaattctttatttaataaaaggtacattttctgtgatgctaatggtgcttgtaaattataacctctaattgaatcatttaaatctctaatcattgattctaaataagaatttttatttttaacccattcattattacgtagtaatatatttttattatcatttaattcattatcaacataaattttcgttttagataaaattatatcatctttttcattcttattcatatctaaaattgtattaactgcacatttaatccaatctttatctaattcttgtctaaatcttttaattcttaattcacaaccaccttgtttttcaatccatggaggtaatgcatcttgtttctttaatatttcattaagatgatattcagttctatcaataaacatattctccattgatgaataacctccatcaattggtttacctctcttaatatttttaaattctccacgtctctttgcatccataattctttgatctgctaatgatctaatactattatcaactgatgaaaatgaatcattaagtaacattgttggtccaagtaatctttccttatacatttcaccccaattatcatcatcatcatcatcttttgtattttctttcttttcagatattttattaagttgataatctaatgcaccctctcttgcatcatgtattcgtactctagtatgtttaggtggtgttataattcgtttaccagttttcaaaggtttaatagaatcattcaacattcttaatgatgaatctttaagactctcctctccagtccatggtttattcattgcaatttctttatcatgtttactggccgaatttggtattgttgttatacctaatgcttgttgatatttataattaaaatttgatggattattggtaatttcatctaatttatgatgtaattcaatcttgttatatggtaatgcatcttcaattacacctgcctttggatcaaaattattaggttgtgcattctctgcaagttcctgtaatttcattttcaataaacttggttcattctcattctgtgtcttagccttacctccattgtatctcttacttatcactcgtattagttgtctattgatcaccgtcattgcaggttcactaattttgctataaagaaagagtactgtgaagagaaagttcaaaatcatggtgatccacacgacgcgacgtggacttcctcattggaaaaaaatttgattaatttacccatttaggaactattgtttacttttcagctgtgtttcatgtttctatttgatctgataggtttttgtaggtagaccgtcaagatgaatgaagccagtagaggataggaaagaaggatggtaatgaaagtcagagtcagagtcagagtcagagtcagagtcaaatggaaaataaaatcaattgatgaagaaattagtgaaaatcatgattcaaatggaataataaatactgatgattgtataaataccagtgaattacataaagatcgtcccttgaccaatagatatattctgaatcccgaatttaataaccttatgataaccaaacttgatgataagaaagaagaagaagaagaagttgaaaaaccaacggaggatgataaagatactagtgaaattgaacattcatcaggatttataccaagtgaattaaagggtatggaatggcctgaaggtgatatttcatactgttgataaggttgtgagtgggatggatatgagtgcagatccagcattggctgatttaggtaccgttttcctagataaaaattcaccaaagaagaatgatacagtctggaataaatttaaggataatcaatttcaaccaattattcaaaataatgaaaaacttaaaaatatgccaagtagtcaatcaactgtacttgatacatttgctaataaaatgggaaataacaataaccctagtaataagagacttaatagattatctgatggtattataaaatcaccatttaaaatatttgatgatacatcaattgataagaaaccagtatctaaaagtaaatcaaaattaaacattacagaatgatgtaccaaattttatgaatgaatccaatgagttatttccaaagaattgttactaattcatcatcaaatggtgcacttaataaaggattatctaatatacctatacttgatatgaaaactccaattcaatcatctaataccaatgaaagtgatgatgatgatgatgatgatgaattttctgatcgtgaaaataaagatgtgacgaatacggatgatataacttcagatgctgaggaatttacatcaattaaatcaactacaaggaaaatggttaatatgggtaatcaactttacaaagatatacaaactggaattcttaataaaggtttgactatacctaataatgagaattcacaatatgattttacatcggctgatgaaaatgatgagaatgatgagaataaacctattgatgataataaacttctggaaagttataatattcaaaacgtatgagggtataaactaattctaaacctgaatctattgatcaattgagaaagagattgaatatggaagcatctaaatataacaaggatttcaatgttggaataccaagattaagatctaatttaaaattgaaaactagtaagaataatataaagccaatacctgtaccaggtcataatggtttaaattttatatcatggtgaagaatataagaataaagtatttgataggaaattacgaaaatttgtatcaaaatcacaacttgtagaagattcatcatatacatttgataataatgatggtaaaggagcatatgattatggatttgatactgaaatatttggaggtgaagaagatgaagatgaaggtgatgaaagtgatgatgaattgagtagagttaatgaaacgagaaatatatttaatgatttatcaagttcatcagagataaataatactataattaaaagtgatgatggtgataaaagaagtaatagagatgatgaggatgatgatgatgatgatgggaatgcgttttcaataacagataaagtactgattgatgtaattactgaatcatatccaattgatgattgggatttagttaaagaattaagtataagtggagcttaaattagagcaaatatcacatttaaataaaatgacaccaaatctttggtatttagatgcaagtgataatcttataagtcaaaatttcggaataccatcaagtgtccaatttctaaatttatcaaataataaattcgatagtttaagtgctaaattttcagaaggtgaattcaagtatttacaaaatttgaatttaagttcaaatgaatttaaagatttaagatgtgttagagaattgaaaaatttgaattgtttagatcttagctttaatatgattaaggggattgaatatttaggaaaattttaaaatgttacatacattaaatttatctaataataagattagtggtataattgattttagaaaatttaagttgtggtttttagaagatttgatattagataataatgaaattgaggagttgattaatataagtgagttacctaaaattggtaatttgagtgcaaataataatagaatacgaagaattgtttatgataatgatgatggagaagatacacctaaacatcctaatttaagaagactttgtttaaacaataataatttaagtaaacttgaattaggagattatcaaagtttaagagagatacaatttgactgtaatcctaagattgaagttattgaaggtaatttccaaggatattgtcaaattaacatcaagatttaatcctgttaatattcaatgagatggtaattgataaatgtttaactaatggtaatatatcgacattacatttaattggaggacgtatgccaaataattttagtaaaataatgatgatgaataatagagggtttgagtttagtaatattcaaacattggatatttctgcaatgggattattaagattaccaatcaaatttagtgagatgttcccacttttgagagatttaaatgttaattttaataaattgattgatttaaagggtattgaaggatgtgaatatttacaacaattgaaattattagataataatatagagaaaattgaggatatttctcattattgtaatgaaaaggtgaaagagaggttaaaattattagatgttagagttaatccagttactaatggtatttacccgtatgtattctacgatgatgatgaaaatggaatagaagatactaataatacgaataataaatttcaattacatgaaatggaggacatatccgcattctgtattgaatacgctcgtcatcatctacccagtgaactggaacaatggcaagccaaatgtcatcgtatgcaacaacttaatggatccacagcaatgatacgatggacagaacaggtggaagcagagttcccagagatggttaatgttagatggtctgattatgtaatatcctcacagtaaatttttttcctttaattctttttcatagtatattatactatattatcatcatatctttgatacatcttcctttgacaaaatgagtgcatatccttggtatacacgtgctactgacattgctcacagacttaccgttgttggtcttgttggtttcactatttatatgactgccggtgttggttatcaagtatacagaaatggtcaattagctgaagctagagctgcaaagcaaagagaagtcatggaaaaacaaaatgaatttgaatctgataatgtttccaaataatcacatctatctctatctctccctatctattaataacatgtatatatcctatataaaaaactgaaaaacttgaaattgctacagaaaaatatatactatacacttattatttcttattcttctttgtacggtatttcaaattatgatattgtcccagtttctttaatttacttattctacgacgttgtaaatgacgtatctcttcatcctgtggattaatatcaataacattctccattgtaaatacttcaccacagtttggacatttagttgtctctaatttatccaatattaatttattcataacacatccacatggtacaatatatgaaaattgtatattttgaatattatttttattatcatcatctgattgtaaatcaactgttatatcagatattggacatttcaatgtatcctctattaacaatatatttaaattaacaacatcatttaatgatcgtattgtgcaagactgactatctttatcatcatcattgttttgcggctggtgtctctttctattaagtaaatattcaagaactttttccttattgtataatttaccatatgcatccccaactataggtttttgcaatcgttccttacttaatgaacaatatctgtaaccattaatcattcttgtgaatttagtcaatgatgatgatgttgtggattgatcaattgttgatgaacctaattttctggctgttaagtttaaaatctctgttcttgaaggaattgtaccaccatcattctattatattgttagtattcattcatcagtttggaaagaattataattatacatacacccatgtttattcaaactttcacttaccaacttcaagaagtttgactgtgttaaataggtaaaataattttttgttaagaaaaatttaattacttcgtggcgcagtagaagatttaataataataataataataataatatcaacatgaaacacaacttcttcttaatcaatcgacaatatgaatacacaacacggtatggatacctttaatagcactgctgaagcacaagtgaggaataatattcaatcactaaaatcattaaaacctgaaatggataatttgaaaaattcaattaatgaatatattgcaaatgttcaaaacacgatattgaaaaatagagcatcatatcaagttaaattatcacaacttaaatcaactgagatgcaattaaaggcagaaattgaatcaaataaactattacgtgaacaattatatgaagaattatcaaatgaaatgagaaataaagatcaatcatctattaaagttgaagaaatgaaaatacaggaagaaaatttagagaaggaaaaattacaattaactaaagatttagaaaatatagaaattgaaattgttaataaaacaagagaaattaatgaacaaaaggattcattgaaaaatcaaactaatttagtcaatgataaattatatcaatttgaacaactattaggtttaagaattgaaccatattctaaaactgaaaatgaaattgaaaatgaagatagtactaatcaaaatgatactgatgaaataggtgttgaaaagataaaattcatatttaaaaatgttgatccatcagattttgcaagagaagtttggtttgtatttgatcctgaatcagtttccattgtttcaacatatcctgaaattccatctgaaacatgtgatgaaataattaaaaattttcgtacatactaaagaaattggtttattatggaaacaaatgagatcttctcttcaaaagaaactactatcttaatagtttgttcaattaatgataagtgtgtaaattagtttaaattatgtagattaatattaatataatcaatcagtaaattcgataacaatagtgaataatgcgacatgttttctcttgaaacttttatgtttacttatttcttccagcataacaatatgaatgtagatgatattagtgtgaaaagagaactagaaactgataataatgataatgatacctaataatgaaagtaaaaaaggttaaaattgaaacagaatcagaaacaataatagaatcagttacacttgaaaatccaacaattacacaaactgaagaatttacaaattcaccatcaccattaccacatgcattaacatcaaaatcaagatcagagatacgtgcacaaatagatgaattacaagaaaatgatccaataaaggaaataactaaagaaaatgataaaattgatcaatcatcaagcacaaaagttacaaaagttaaagaaattaatgaaaattcacataattcaaattcaaaattgattaaacaatcgaataggaaatttgaggatataattgatggatctgatttacgtaggtttttgaataaatcattatcaggttatttaggttaaaggacttgatgaaattgttaaattatgggaatctggtgaatttgaaatagatacaaatgaaactaacatagatgatgattgataatcaattaaggaaaaaagtagtgttaaagttctcagatatactgaaacaactagtagatgagtaaagtcattattagattatgtacacatatatataaataaagcaacaaagaacattttataaatacaggaaatagattaaaatttctcttcgtaattattatatctatcatctcttaataaacttaaagtataactggataataatcttactaaaccaattttccaacctctgaaaatagcctttaatccaatattttcttcactttcacaaacatcaacttctaatgattgtccctcataagttaaaggttttgaaccaaccagaatataatataatgttgatagataaccataataaccaccaaattcaatacacatatcatctttattaacacgcataatttcaggtaattcatccctattggttaataaataattaacttgagctcttgaaaataatgtttcaaatggtaatcttataaacataccaataattctcattataactgttgccatattataaaaatatggattattatatttattgattctcattgaatttaataaataatcaggataatgaattgtaaatgatttaataaaatttgtaataattgatggaataaataaagtttttggtacatgaaatatatgtaatcttggtatattccaaataatttccctaaatgaacgacaacctcttgaacttgttgtaattataaatttcattctaattaatctaatttgtgacataattaaatttgcaaatacattactgaaaatacttaaaattaaactccaatttcgcatttggtgaatgaattaattcaacaaataatggatcaggtataccaattatacctgaaataaatcccgttatccatgattctatagtatattgtaatgtattcattaaaaatgttgtattaacagcttttaaaatacctcttggaccttcctttgttaataatgcattaatcatatcaaatgcatttaatgattcctggttcaatcagtatattaattaactttgaatcattattattatcccttgaagattttttccttaatacattacttgatttcctacgttcaattcgactatttcttaaattttcaatttcattgttattattattattaatatcattatattcattactatcattactttgttcattatcagttaatacatcttccccagttgataaattattatcaaaatatgcattacgaccaccttcaatttcactatctgaatcacttgtattatcataatcaattgtttcatttttattagattttacagttaatcctttcttcttatttttaaatgatcccaacttgtaataaaacgcaaattacatcaaatggttgacttaaaatacatctaaaccaaccttgaataaatcttgttgttaaagtaattaaaattgttttcaaattatttaaatcaaataattcattccattctaagtcaccaactgatttaccataacttgataaatcttttgaagttaatggagatttagcagatgctgcaattcttgaaccaaaaccatgtaatccaattcctgtaccacttgtactacctgatccaattgatctattaccatttaattgagattgaacaaatggtaatgattgtgaaattgtttgtgatgttgatgtatcaattataccaatttgtggttgataagcaataggataatgtaaatcaaattcagatcttgatacatatggacgcagtgatccatcaagataatcctgtgtattcattatctgaccgttggttaaatgaaaaggaaaggcaaattactaatacatgcacatgctgcatggtcagatttcacataatagcagagggcttgtcaaaaaaaaatatcagatttttgtctttttactacatgatatactttaattttatttcttttgaaagttatataaataagatttgatatataagttttatatataggatagtaataatatagtaataatataatatatttaaattaaatgagagtggaaagataattgattaattaattatcatggattctccaactctttaataagtttaagtatttccaatcttcacttggaccatacataccaaaagaaattggtgataaaaagataaagaaaccaataactaatgcatataatgataaataccaaataaatgtaaatttagatgaattaactctaatatcaataaaatcaacaacataacacataactaacattgcaaaatataatgcaggcatataatgatgaacatatttaacacgacccataacaacaaatggtaagaaatgtaagaaccaacctaagaatggataaataccaccataaattaatttatataagtttgattgattatttgataatacatcatcaattgaatctttaccctttaattggaaatcatcaaattgtctttgccatctaattaaataactgaaaacaattccaaagaaaatgaaaattgataaagttgaagtccaagttgttgcaggagaaccaattaagaaatatttataattttcatcaccccaaccacaaagtctaataccaacatttaatgatggccattgccaccaatttgatgctaaatcatcttgctttttcaacatctggaactaatgcattattagttgccatcattgcaatatttaattgaataaaatctttaaagaatgaagttttaggtaatttaaaatcttctggaggatttggtaaatttggatttatatgatcttcaatattccaccaagttctcttatctcttttaaaaggatttggccaacaaacaacttcaccttgtctaaacccccattgaggtaattgattatcagtaacacctaaataacaacctaaaatttcatttttaaatctaactgatgatgttaaaggatgtaattttaatgaatcttccttaccataatgatcaacaatttcaacaatccaattatctttatcatcaccaacaactgcatcaccataacctgaaactttcccaaacaccttttgtaacaggagcaggaacttcatgagtatgtaaatttctaccagtcattttatgaacaattctaactttcataccatcaacaacataatgagattctctaaattcatttcttggatcatctctaactaattcgaaaatccaatcattatttgcatctttatgagaataagttgtaacttgttgttgatttgaaccttcaggataagtttgaacatgagaatgtaataaaccaccacttaaagattgagattttaaagtaattgttgaatcaattgtcataacatctcttggacctgaagttaaagttgaattatgtaaattagcttgaaataatgatgacattgttgcatcaccagtacctgaacctgataataaatcaaaatgaattttaaagcaaattgcgaaaactgttaaaggaataaagcaaagagtgaaaattctagcaatccaatgacaaatataaactttaattgaaattgttttattaagttgaccaaataaataccataaatcaacaattgtataaataccaactaatgaagtaacgaataaaccaaccattttaactgaatcaacacaaccaattgatataccagttaataataaccatttaaaccattttctagagaatgcattttttggatctctattaatattatggaaagtatagaaacagaggacagttgtacaagtaaagaataaaagcattgaatctaaaaggataaatcttgctaaagttgtataagttgtttcaagacaaaccattaaagtaaataaccaagtaactttcctattataaccaatttgtttcattgtaaaataagcaattggaaccattaaagcaccaaaagttgcattaaataatctcattttaacgaaatcgatatattcaggatattcttgacctgatgggaaatcccaagaaccattataacctgctaaataacctgagaatccgacaagcattttacctaatggaggatgaacatcatgataaaatgaatgtcttaaataatatgaaccaaatttaccaaaatgagcttcatcccaaacaacatttttatttacaccaattttatacatacgaacaaagaatgataaaattgtgaataaaattggagctaaataattttctaaattaagtaaaaatggagttgaatcagttgttgaattagaaggatggaataatatcatcaaatttagcaggttttgaatctttcttagctaaatttataagtctttctttcatttgagattcagtgatattaattgaaggtatcattatcactatctgaatccaaagagatggcaccctttttagaacgagacattatgatctttggatgaatatgatatattgattaaaataggataaaattaaatgaaatgatatcaaaaaatcagaatatattacaatataaaacaccaaatataatcaaattaaaagaaaaagaaaaacaataaaaacttcaacaaattgaaatagaaatagaaatagaaattgaaaaagattcaatacaattcaattcattacaccgtgtcctctttctttcttttatttctttctttctttctcactcagtatgaaaaaaaattattattattattattattattattattagttaataacgcgtttattcttttaattatatatagtttattgaaaaaaataaaggggtcaactgggaattgaacccagggcctcctgcacccaaagcaggaatcataccactagaccattaacccttttatgtttgttagggtagggggtttgatgtgctagtcagtggctgtaattacgtaagcaaagtgttgtaagtcaatttttttttctaattttcaccatttttggtgtttcaaaattcgtcaatataaaatttcaagaacttcttagatttttcttttcactggataaatattgaatagcattatttattagaacgactatatatatatatatatcaactataaacaagtaattaaaataaacaataactaaagtgatctgcattcatgaacataccaataaatacaacactgaaaaaaattttctcatctgcatcatactagtcaaggtggttacttaatcctttctaataatctctatgttcaatcaaaaagttatagaatttcacaacactctgctagcagctttgaagctgaactttttgcagctaaagaagcattacatgccgctttggccacacaacattccttgagagattttggttataaaaatgtaaaaattatcatgcattgtgataatttaccggtggttaatacaatcaatggtacttaccaagacaatcaattaaaagaaaaaaattggcaaaatacaattgaaagattaacatggtattacaaaactgaaaatttttctatccaacatatttctggaaaattaaatccagcagatttgttaaccaaaacattaaggtttaacgaaaatgagagaattgttggaggaaacagcattaaaaaatgtgttcagtttagaattttcaaaatcaattaaagaaaaagttgataaagagagtaaagaaaaaaggaaaaatgataacaaagctgacattttgcactccccccggagatgttttaaatggtttcagttcatatcataaagcttatatgtgttttatcccttcattatagcatgatgttaagttcagcgatatacactattttaataatatggttattccattaagtgttgaaatttatgttgttgatactgattgtaattatgtttcatgtgtttctccatctagttgatttattgaaatgaacccaatcagtaccgaagatacatgattggttgcagatgtgtaaagtaaaagaattaattaacaaagtttaatgaaattcgtccaagatcctcatattaaattaaaattcaaaaaacatacctttaagtatcgagactcagtgaatgggcagtaagtagctaacagtttcaatgaaaagtttttacttaacagtaactattattatatgaattacttatatatagtcttttcatagagtatcagaactcaatatattttagaagatttattacaattacaaaagttaactgatcattaacatcttttttggataaacctatttaccagtagtacacatttgaaatttattcactgattaaattttatagaaagtgttttatagcaatccaagatctaaagtgtttttttgtaggacaaatgccaatcttttcaattacttctaattgtcccgggtaattactctttattgattcctcaagattaactcctaatttattgcatttaacagcaatatttcgataaaccctatacccactttccctatttttctcataacattctttaacatgttcacccatagcttttattatcaccacttgatgtaaacaatcaataatgatcgttaatttccgatcacaaccattgacattataaaaacattcctttatggtagttgaaacataatttaaaaaactttttggaagattaggtcttttaaaatttctcattctcattaagaacccactcaattcttgcatttgtgggaaaatattattgatcttagccgcttgtatttcaaaagttctggaggtgtaactatgctgtgattaaataatgtcttgtaggcagtaaaaggatttgatgtttcatccaatgttgtaaaagaatgtttccaagttgaatcaatagtggtcattgtttgatcgccaaacttatatttgctgttagacggagcaaaaattatacccagttttttaggatctatcacacgtttaataacataattatggtatctaaggtatggaaattcttttagttgtttgactgggaaaaatgaacaacttccaatacttaaacaacgatcttcataataatcaaaagtatcaagatttgatggaagaaaatcgtaaaaatattcatcattttcaatacgaaatttggaacaaattacttccttttctctcgttaatttggctaaatcaagttccacttctggctttagagaaatgtctaatggcatatttgattctttaaacattagataatatttttgttggtcttcaacatcaagaagctcccaattctcagtaacgagatctctcgttaaagtcattcgcaatttgttttgatccatttttaattccttctcagtaaacaaatgatcaaaatcagattgtttaaatgatccacccgtgacctcattcatcaatatctcccatatgttcatgttttcccattccgaagcaagttgttcaaaagcattggttaatttacttattaactttatgtgttcttcttctggcgataagtaattattgtcacatgttggtttcccaccaaatccgtattttaaaaattcttctcttgttaaacatggggtttcatccaatcccgttctattatcaatatgtaaatcatcacttgagctgtctggagtagagggcatactttagccttgattaaacatatatctagaacaatgctattgtaaacgatcaaagattaccactgtctatataattgctgcacaatcatgtattttttttacgtgattgttatgtaagcatgaacatgttttacgcgtgattcattttggcgtcgatagtttgaaatttggaaataatcctatcagcaattagagtggttttggtgttttttaatctaataaggtgttctaatttgttcatagaaatcccaatgagttacacagatgatgcacctttgtttttcctatttttaagggaaaaagtaccaataatactggaatcagatataaaatgtaaatcttcttttactattaaaaacgtgcaaaatattctctacaaaattatcaaatctttttaccaagataatggggaggctttgagtgaaaaaagatcaaagcgttttgcaacaggtacaacttcaaacttcaatcttttttataacgagagattagggcaacccaaatctagtgatattcaatttaatgaagctattgataattttattcaaaatcagattaatgatgatattgagactcttgcgaagaaatatgggtctagaaatgttaataggagaaaagctaagcttatttttaaaaatttcaaaaatgcaaaattaaccaatagaggttctttactggggctctttaaatctatacggtttgaatcttgggttcttaacctacactgaaagctagtgcaagaagaagacttaaatttgaagatttggaaaaaattaaagaatcatcattcgatttcatgaagttaaatacaaagagagatcgagatattgcagatacattgaatgacatttttaactgttttttcaatgaaaaaggatgggattacaatggtataatagattcaccattcattggaataaataattgcgacagatacgaaactgattacgttttaactagtgatgaatttgagggtgcttcagatgaagatacttcatctgaagatatttcatctgatgatacattatctgaaatgtcggtagataatctttcaaattctaataatattaatgatcaagaggttcattctgaagctcatgaatttccacctataggcgtgtttccaatttataataataatgatcatgaggtttcgtagatctatgtcattaatttatgtttttagtagttcgaaatatacattatattataggaagtaattccaggtgctgtgcatagaacacataaaaatatattactatctgtacataaaagataagtgttttcaaaaacttttcacacacatggttttttattatccaatactggaactttgtgcagcgttcaaaatggtgattcacatcgtagatcagtaagagtaaataatacaaaacacctttattgaattgtcatgttcattcaaaaacaataatgaatacataagtttttgcaattatatcttaaatttatcctcaaaaccttgtaaaagtaaagaatttatacaaactttttttatcataataatgcaaatacatctggttcaaacaaagagatcgtgaaaatttcaatcactgaaacgatggattcatgaaataaaggattcaaaataaaagtgaatgttgtaacacatctggttcaataccaacattgttatatttacacaagggataacccttaattatagttactgaacacaaatttttttagatttttttgaatgaatccaagatgcaagacgtttctttgtaggacaaaatccaatcttttcaatcacttccaattgttcggaataattatactttatcgattccataaggatcaatttcagttctattactttgaacggctatattttgataagctcgatatcccttttccttattttttgtataacattcttcagcatgtttacccatggctttcataattaccactctatggaaacaatcaataataattatcaatttccgatcacaatcattacaatgatcagcaccatcaccggaaaatgagcatttcttcttagcaactgaaacatattccagaaatgttttaatagctgcagtccttttatcatcaatcatactcattaagaacccactcagttcttgaatttgtgggaaagttaaaacacagtaatctcctgatttcatattattgatcttagctgcttgatcatatcttatctttaaatattctggaggtgtgacaatgttgtgtttgaataacgattgatagactgctattggatctaaagtctcttctattgttttaaaccgatgtttccatgttgattcaatgatatcaattggttgaagaccacaatcttttctcattatcgaaggagcaaataatattcctacttttgtgtgatctactgcagtcctaagaaggtagttaaggtaattcatgtatggaaaatcatctctttgttcaattggataaaaactacaacttccaatacttagacagtaatcattatatggatcagcttgctgaatgtttgatggaagaaaatcgtaaaagtattcatctccttcaatatgaaacttagaacaaattaattcctttttttttcccaagtgtattaactgaaattcttctttctttggatcaaagtttaatggcataccagcagctctaaacaaaagagcatatctatctctatctttcatgttgagaaaattccaattttcaataacaaaatcctttgctaacttcatctttaattgtttatcattcatttgtagttcttctttcgtaaaatatgaatcacactcagatattttgaaaactccacttctgtattcagccattagtgcatcccataagttgagattttcccattcttcagtaagtctatcaaaagcatttttgagatttgtcctcaaacgtatgtgttcggctgacgataacatcccttcactaacattcttattattcacattttttgttcttcttagtgaaggttgaaggccatatttaaaaagttcgtcaaatgttagttgttgttgtttagccgattcgtgtggatcattacaatcattagattctgtatctgataaagaatcctttgaatcgtctgaagaatgaaagtccatatcgttaacaatctatacgggtattcagtagtatgaaaaaaatgggtctgtgtattgaaacacacatttatcttaagtcgacgttgtcttacaacatcaatagtaaacactttcataaagattgattgtatcattaacgttcaatttagacacacttattatgtaagcataagttgaaaaagactcgcacttaattgcttaattgatgttattaggcagtaagatgcttaaggaagataagatacatgtagctgtatgtttcataggtctatgatttctatttgtttataatagatagtatcaacaaatagtataaatcaatacaaagagctatacagagaataagtaaaaaaaacaattatgtgtgagtaaaatactattgtccttcaaaaaaaaattaaacgtatcttaatgtagtgttataaattaacattaaaataattaaactatgcctgaaaagcgtgaagtctttgtacagataatttttatcttggtgcttacgtaatctaaacaattaaaacaggaaaaaacaagccttttaaaaaacatgtaagtaatatgaagcttattagtgatataaagtgaatatctatattataatcaatagagacattacaagtggtatagtctgaaggatagactttaataataataataatcaaagagattaaatgaaataagatttaatgaagaaatatgatgaataatttaataaaccaatgttgacagaaaatcaacggttatgaaaaatgatgggataggatcattaattaatttattatatacaacttctccactaattgatttagtcacattatattacaactaagaactgaataatagattccccacatggagaatcgggctggcttgtgagataattaattacagttctttaaagtatataaataacatgtataagctctcttgagcgggacatctcaatatatgagagttggttgtgataacttattgtctaactttatcttaactaactactcgcttaccagttccaccgacagtattcgcatagtagtattaagtacaattagttacagttattattctttattgtattgaaaagattcaacataaatattaattatttgattacgtaatattttacgtacactatctacaatatcctcctaatactttacatggtagcacctttaggtcaatacaattgaagaatatttttaaaaaaattttctacaagtacaatggttagagccagaaaaaatattcatcaaactgaaactccaacagttgaaccatctgaggaaccagttgtctcagactttccagaagttaaaatgattccatataatcatattaataaattctatggtaatccaaatgaacgtgatgagtttgttgatgcagcaaaacttaaacaaactgcacgagaatggttgtcaacattcaaagaaattatgacgatgaataaaattccaatgaatgcaagaattcattatataagaatcggccttaaaggatctgctcacttatggttatcaagtatagattctgaagatgatagtttaaactggaacgaatttcaaaaattatttaataaagaatattgtaatacttcaattgcaaatagacaaaataattattctatatgtcaattacaattttcttctgatgatactgttcctaaatttaatgctgaatttgaaagattgttgttgaacagagaaactccattaaaaccagactttgtcatggatttatatttaataaaactaccgtcttacatcagaaaacaaattgaaaatgcaccatattcaaattatcatgaacttaaacaagccgctgagcgtgttgaaaaaacttcaaacttcaaacaatctcatttcaaacaaaatccacatttaaattctaataattattatcacaatcgtgaatatactgctgaaaattatcaagaagatagttcccatgataacaatcatcaaaaggtcagaagacttaatgatcaagaatgaaaattcttaaccggttaaaatcctatattcagaggcaaattaaaataattatgctaatttaataacttgaatcatgattaatatgcttattataaattataatttttttttctagctaaggctaaggcatacattaacagattgatatcctataattttccattgctttgtgaaataaatgaaaccattagagagatttaagatttttatcttttggaaattgttttaaaaactcatcgtgataaactttcaatagaagaattaataggaactgcagagcaacgtgcatccgcatcttccgaagtaagtataactcaatttagacacgatgaagggtatattataacctttactaacctcaaatatgattacctctttggtcaattcactgcaatgagaattcaaatctaactttgaatttagacttactcaactatattaatctggtacataccaccataccaaggctgataaaaaggctaaaaggcaaatagttgaagatcatgataagaaattgccattcaatccctgaattagagacatatgaaaaatttattgtatgttaatttacgatcaatattattctttgatgatgttaaaaatgatacctactgatttacttctagaaagaagatatactcataaaatccaattattaattaatatactttattgggatttagtttaaattaatttaacaaatgttattacagtagaggagttagagtttataatttaaggaaattagaagaaagtataatacttcatatatgactgagaatttacggctcttatatctcttacatggaaatattactaagatcttattgaattaataaataaattttgaattaatattatcaaattacaacaattatatcacaaagtgaacatcgagacgatgtttcccgagacgggaggatgtaagtaatatgaagcttattagtgatataaagtgaatatctatattataatcaatagagacattacaagtggtatagtctgaaggatagactttaataataataataatcaaagagattaaatgaaataagatttaatgaagaaatatgatgaataatttaataaaccaatgttgacagaaaatcaacggttatgaaaaatgatgggataggatcattaattaatttattatatacaacttctccactaattgatttagtcacattatattacaactaagaactgaataatagattccccacatggagaatcgggctggcttgtgagataattaattacagttctttaaagtatataaataacatgtataagctctcttgagcgggacatctcaatatatgagagttggttgtgataacttattgtctaactttatcttaactaactactcgcataccagttccatcgacagtattcgcatagtagtattaagtacaattagttacagttattattctttattgtattgaaaagattcaacataaatattaattatttgattacgtaatattttacgtacactatctacaatatcctcctaatactttacaaaacatataactgggcgtgtggcgtagttggtagcgcgttcgccttgcaagcgaaaggtcatcggttcgactccggtctcgtccaatatatttttgttttttatctataacataacgtattacataataaccaaataatttttgttactattatattacaattaacatgaatttcaatggattaatttgaatcttctttttttattacaagtttatacttttcttagctcattctatacaaatcatgggtaatgcagcatctaagaatagtaggaagtttgttcaaaataagccaaatatatcattaaagaaaaatgagaaaatttatacaactaaaccaccatttgaattagatggtgaagaaaattctaattctaataatttatttaataaagttgttaataaaggtattgttaatataacagataagaaggctgaaatgaaatttaatgagaatcatgaatcaattcaagttttgaaaaatcgtgttaatattgagaaacaatatgaaggattatttataccaaaaaatgctgatttacctgatacacctgaaagatttttgaaaaaggaagatattgacaaaatcaataagattaaaaaaattaatgtaaatgcgacaaatacttatggattaattgattcaagtaaattaagtgaaataataactaattataaagttaaagataaaaaagattttataggatttgaaaaattacaaaaattaattgatgatggtataattgatttaccaaaacataaagttacattacatgaaagtattgataatgaaacaaagaaagtaaagcaaaaacttatagttgttaaagataattggattgaagaaatgaaaactaatggtgaagttaaattaagtaaagataaagaaattcttgaacaatttaaaatgcttgaagatttagttagtaaatcacaaatcggtaagaaggagaatgaagagaatggagaggaagaagtcgtacttaatagaaaaccaaagagagtatccaatgatgttaagaagatggtgtagtgtgtagatttagcgtgtaaagctgtatatagtgaatgattacgtaatttttaaaagaaatagattaggtaaataaatcaacaagcaagatgaatattattgtggatatggtttctttaattaagtaagtatataagatgtctgagatagagtatgatgatgatgaatctacagtttcatttgaactgtatgaagatggatattatagagataaaataataagggaaataaaagaagaaggtgaagaatttgaagttggatcattcctattaaaatattacaaatatcgagagttgggtgatttatctaaaggttttggaagtttaattgaaggtattaatgaagaattaattgaattagttaatgaaaattatttaaattttattaaattaggtaaatcaattgatggatcattagatttaattcatgataataaaattgatataagtgaatatttgaaaaatttaaaattaagtaatgaaaatattgataaaagtactacaaatataaataaattaaataattatagatttgaattaaatgaaatgaaagttttcatatcaagattaattaaattaaataaaatgattgaatggtttgataaattatgtttacaatttgatgcaaatgagagaagtggtgatatgatattagaattagttggtgtttatttaggtataaataaaatgatggatagtattaaatttattgaagagaatattatatttgataatatggttaaaaagatgaatgcattaagagttgaatttaaaagtcttttgaaaaattatcttgataaatttagagatttagataatgatgaagtatttcaagtatttaaaatgtaccaattagttaaggatatataaataaaagtagtggtatatataataatatatttagaagaataagaataagtatttaagaataagtatatttaagaaaaagcaagaacaataagagtaatcataatgagtatatgcacaaatcaaatttaaacactccaaccatccatatttaaactattatgaacatttgcttgaatatctttccatatagccaatttatcattttctgttatcgtttttttgttcaatattgccttttgtaaagtagtgttatttgatttatgttttgcaagtttactcatttttaatttaaattcaattctacattgatattcaataccaagatttaacataaaattttcaattatatttctccattcaaatttgaaataacaatcatattgaatattacctgttaagttattttcattgaattgttcaggttgtacatcgaatgaatcaattaacatttgtttatgtctttttctagctcgttcaactataaatttagcagtttgaactctgaatgattcatcaaattttgcttcttcataaatatctgaatgtgcaagataatctgcaatcattggatcaggtaaatgaggtgggataatttgaattcttaaagtttttgaagaagaagaagaagatgaagaaggtgataaaacatttggtattttaccattccattcaggacgtaattgtggatatattagtaatgatcttacatcattaatttgccaatttttaagtggtcttttagtaaatactggtctaccattagaaaatctagcaacatctaaatcaggtgaataataatcagtaaaatctgtgggtataacatttgataatggtaaagtatttgaattatttgataataaagttgcattagttgaaactgtaacatgactaaataatgatctatcatccatagcttcctctaacgatcgttgttgagcttctaagtaaagattttgcagcatcagctgaaagtgaacatccggaccggccggaatcaattgatgatgcctcatctgaatcaactatattagcattagccgttgcttgacgtagtggagaattaatgtattgagatttattatgttgtatttgagggtgttgttgctgtatcacttgaggatgttcctgtattacctgtaatttagatttttgttgattatgattctgattatgaatatgactgtgaagttgattattttgctgtttctgtaatctcatttgagccaaatgtgcagccacatgttccctagcagcattctggaactcaggtggcgttcgatagttatcactaccattacggaattgaatgtatccgaacatactatactcccagaggaaactcaaaagaaaccacatacagttcccaggctaagtaatcgtgatattaataaattgccccacactgagaaaattttcaaatttcggaaattcggaaaaattaaaaattgcgttacatggaaatttaaatttatttaatttctttttcttaaaatctttttctttctctaatcttctttgtcatttcatttgacaatgtcaaattggtctaagctacagaagaagaatgcgtctcttaagaaaagtaagaaagtagtcgacactagagtaaaacagagaacctctctttcaactttagctaaggaacatatacttaaaaatactaaaccacctagtagtttagcatctacaactttaaatacacatcaaagtgcaaagataataaataataataataagaataataataacagtacacaaaatacccaaacaaccgcaaaagttggtaaatttatagcgatggattgtgaatttgtaggtgtaggacccgaaggtattcaatctgaacttgctcgtgtatcaattgtggattttttcgggaaattagtatatgataaatatgttcaacctcgtgaacgtgtcactgattggagaacttatgtttcaggtataagaccttcagatatgcaaaatgcaatatcctttaaacaagctcaaaaggaagtttcagatatacttaaaaatcgtgtccttgtaggtcatgcaattcatcatgatttagaagctctttatttaactcatccacgtaatgatataagggatacttcaactcatacaccatttaaaacaaaatattcaaagggtaaaactcctagtttgaaaaaattagctgcagagatactgaaaattgatattcaatcaggtgaacattcatctgttgaagatgcaagagctacaatgttaatatataaaagtgatcgtcataattttgaaatcaaacatagaaaatagtgttaaattaatattttataatatataatgtcttatctatatgattaaaaagaaactgtattgtattgtattgtattgtattgtattaattgttcatatcatatatcatatcatatcatattatattataccaccatcatcggttcgtaaactgtccttataaatctctccaatattttcaagtaaatcatctaaaattttaaatctacgtttcttagtctcaagtggaactacattaacaccttctatattaacctttgtggtactgaattttgaatcaattatacctgcaaattcagatgcttctctaattttaccctttgttaaattctcactatatttattattgttcatcaattgtacaaccatgtctaaaactttctctaataaattggatgttgtacttgataaaacaaatttctttaatacttgttcatcattactaaataattcaacaacaaaatctggattggtcttaaataattcaacatataatgtaataactctggatgttgcaatttcatctaattttaatttcataaaataattagatgctccaatacatgtagtataaacattcaaatttggcttttcaaaccattcaattagtaattttggtatcatacaattattattaccaattataaattcaatattctcaaatccacattcttccattgcttccattaaatcttcatttgatgtacatgttaaaaacaggaaaaatagataacatttataattatcatcatttttatccatcttactttcataatacctaacttttaaaagttctttaattgttgcaaccgcctcagaatgtgtaaatggtgtttctaaacctttacagcagattaaaattaatatagaatcaaaattttctctagtaatcttgaaatcaaattcacgttcaatcgcatcaacatattcaatcaacatttttcctgaatcaaatatataatcaatcatcttaatgttttcctctttacaatgctcactaaatttagaaattgtaatcttaatatatcttgcaccatatttataaaatgtaatattatcagtcaatataactgttaaatggaaccaaaacattaatggattgaaaatagatttataattaacaccttgaattgtttgttcaaatgcatgtaacgaacaaaccattaaatttaaatttttggataaaataggtgcatcattactatcaacatattgtaatccgactttccttaataattcaagaatttttaataataacatacctgaaataccttgttttgaaattgaacctaaaattaaaattgctctattctgtagttgtaattcactatcaaatgcaatcttacatatacaagaactccatttaatcatttgtaaaatataatcttcaggattaacatcattctttaaaaatttagtcaataaatcacataaggtaataattgcaacacttctattagaaacttcaatatcaaaaccatcattttcattaatctttctatcatcttctctagttaaaccaaataacattctaaatcttgcaccatttaataattcaatttgatccttaattagtaaatgttgttcagctgttaatgttggtttagataaatatgaatggaatgttctagttattaaatttagtaaacattttctaagttctaatggtccataatccatataaatggtaacaatgtagaaaatatcaccaatatatctatcaataaaaattaatgaatcaaataccaaataagataaaaatctagccaagacagttgtttcaatccatcttgtatgtgcctcaatttcactttcattatgtttcatagtatatgatttttccttcattctaccaatgataacactacaaatttcaactgatgatcttaatggccaatatcttgtaattctaaaccaatcatgtccttcagcttcatgatcaatagatgctgcaacaatttcatcaataataatttcaattaatccatcctctaatgataattgtggccaaatgaaaactgaaaaaacttgataattattttcatctctacttgctctaacaaattttctaattaaatcattggttctagctggtccaccaacagaatgtgataaataaatgttcttataaatgttcttaacccaaggtgaaatacagagtaccattgattttttattttctacatctaatttctcaaatgatgtgaaaaatccataaaggaatgagtatgataagttcggatgatttactgcaatactatttgaaacatcacaaatataatcaatatcaccatatgggaaaataaccccttcaatatgttcaataactttatcagttttcaaaccaacactttgttgaattgatgataataatgaatatgatgatttacgaacttcatcagatttagataataacccagaaaatgaaatattcaataattgtccaactaaactatcattatttgatccaataaatgcatcttcattattacctgtaaataaattaccattgttgtttaatctagcctttgaaaaatatagggttctcataatttcaatctttttggttgatgtgaatataattcttttatttgttttcatatcaatcattgaaatttcattagcaacacctgtaaatgaacttggtgaaatatcaattagttcatttattttataacaatcaaccatgttgattatatgcattttattaacaagtttaattctttgcggtaatgctgaagtaacttgtacaaattgattaccaatctttaatttaacaggaacaaatctattactttcctcttgataaatactaacatcatggaatgtaactctactgtcatgtgatacaggattgaaataaccaatcaatttgttcttacttaaagtcctactatcatcattggttgataagaaaatatattcagaattaacatgagagtcagttgatgtaatctctaaccttttgaaaacttcaaaaaatttactagacatattcatgtaatatactctcttacaattttccacatatttatcaggaacaattgatcttacaatatctctacctctttcaaataactcaaaattattaaacgctgttgcatccattaacatacaataaggagtttcccaaaatttagttaatgtttgtaataaattgtaaatatatttttctggcgttaaatcttctggaaattctaatgtattgatacaaattaatggtaaaccatcctttgtaattaaaaccttaataaatgtaacatccgacagtgttaaattagttcttgacattaaatcatatagtaatataccttttggagacttatcatctttaacagtttctggaatttcgtaacctcttactcttctaggtaatccagtattagccaagataaaatccattttcttaactactttcaattttactttcaagagtaatatcatatccaaacgattgtgataaataagcttttctaatttccatccaattactgtaaaagaatccatgtaagaaaatacctgaatttgattcatcatatttcatacttaatatttccctttcaatacgaatacctctttcatactgttcatcaatttcagcaatttcaatagaattaaatttctcttccatattaaaatcaacgacttttttcataaattcaaaaaatttacccttagcataagataattcatctagtttatcttcaattagtggtaatctaacagcagattcatttacaattgtttgaataactttagctaattgaaccagagatcttttaaatttcaaattaggagaatcaataatatctgatctttcaggtgcaacaatggttggattgattaatcttaaaaataaataggcattgattgatgtatatttactatcatgtaaaacttcagcagtcgtatcaaaaatagtttttgcaattaatctaataccagtaggcatattttcaacagaatcatataaggaatcagcaattaaattcaaatatttaagaaaagtttgatattttcttcttttgttctagtgtcatcttcattaactctttcaatttcaaaaaattcagatgaattaagcatttcttcaaaaattggtctaaaaattgaaattaaatactgtttagcattatcatatgagtataatgcaataactctagtaccaattgtatttgatcttaaaatttcatttttatcaaaagtgtgtaaaatatcatatttgatcaatgaaataatcagttttaatttatgcctttcattaattttaagttgattaattgcagaggcataagcttcaattttagaatttggacaacatgaagcagcagctaagaataaatcataatcatctataaataaatcagttgcaccaatgaaaagtgttgttctagaaacaactttttcaaatctcattgaaatatctttaataatatttgagaaaaacatcaataaatgaaattctgattaattcatcagtatgataacctaaaggtaatgaatattttaaaccaattttagaatttgcatttaataaattaactaatgcttgaataacttctttgataatatttgaagaattatgtgtcataacattaaatgttgtttcattttgagaatttttcatttcatttaatttttctaataatctaacaaataaattaaaataatttgaaaaaacaacacttcgcagtacttttatcatcatctgatccaccataattatgtcttggagtatctaatggtaatttcataaaagataattttcaacataacatgaaacttcaactctaatatccattaataaatcctttaattctgattcttggaactctttaattttacttgacattttcttaacatttgcattatttatattactgcttgaattggatttagtattaaatgttaaaactctaggttcttggctttttaacagaatctaaatcaaatgaagtttcaagataatctgcagtaattctagcatattgatttttagtcattatattaccattcagctgataattcatttaatttttgtaagaaaataacttgtaacttacaaaattttcaattttaatcttaagaaagtcaggtgaagtattctcaacattaaacatcttcattaatttgtaattaacgttccataaatcaactgcaatcataaataacgattcactttcaagttgaataattgatcttaaaacacttaggaaaatttcacatgtattaaattcaccattttttaaattaatttcaaattttggtaaaaatctttcaatttgtgttaatatcagttcagataaatatggatgattagagacacttaaaatttctcttgcatgttcacgttttttaacatcttttgtaaataaactaataaatttatttgatatgaatctttgcaaattttttaggtaaataggctgtcttgaatcatctttgaattcttttgataatattataccacctaatgatgctaaatattcacaatatatttccatatcttcaacaatgacatgtgtttcaaaaaatttatcaatttctttatcactcgaattaagtgttggaccattttgatagtcataaacaattcgcaactttttcatacattaactgccaaattgttattaatgttgaagttggtttcattaattgacacagatgatctcttaattttttcttaattgatacaataccaaatgtcattttatcacctagtatattggttgctaattgtaaatttgaattatcaaaacaatctttatgatgatgattatttgtaataacaaaaacataaaactgtaataatcgtttagatattctaatagtttcaagattacttgagaataaacccagaaagacaattttttcaaaatttgttataattctacgacaaaaatttctaccatgaaatgaatcaattatatgacgattttcatacataagttttaaatctgaattttctgatcttttctctaataaatctaaaactaatctaattattctatttcttttttcatttgtaatattagcagaaataccaactgatgaaactgaatcaatcataattgatgaaccaacatatgcaacaaaaactcttattggaacattatttgcaacagtaatacaaaaattcaataaaagggattcagttgcactgaaaatttcatcatcatctaaatataataaagaaacaactctactcattaattttctgaatattttttcaaaagtaacaaaatcaggattatttggatccctttcaacaggtaggatagcaaagaaatggatatgaactataagataattaataaattaattaaacattccttaagtgttgcaaaatcatatttattaattttcctttcgattaaagttatatttgatatcattacccagattagtttcttgatcagttaatttaaaatttggcagtaaaggttctgaatcatcacttaattcactacttgttgaatttaatgaacctgaatcatcaaatggatttgaacttggtgacgatataccttcttttctatttttaattaattcatttttaattctcatattattgagtcttttacagattaatgacattattttaattaatgaatctgataaatcttggataatttgaaaaattttatcacttaatgatgaagttaaaattaatattctaagtgaaccggtaaataatgataataaatctgatgaatctttggaagattttaataatctattcaaagttttaggtaaaatatccatattgacaattgcattaattgcgaaaactccgatttttagttcatgaatgatttttttattattttcatttgaaattgaatcagtatcattattatgattagattcataatcttcactacttagggatgaatttgatgaaagtgataaatttttattatttaaactagttggactatgactatttttatcatctgagaatgaagatccagatgatgatgtaaatgaaggtaaatgtagaaaattagtttgtaagttatttgaatttgatgatgaacttgtattattatgactgtgatgatgatggtgatgactagtattattattgtgataaagaaatgaatgactttgaccagcagtatttgtgtcatacaaatctatattcagttgttttaataaaggatctttcaagaaaagaacaaattgatataaaggatgagatttatcaattgaaccaacatgaacaaccaattaataaaaatgaaattaaaggttgagcagcatcaggatttttattaacttaattgagtgaaatcagataaaaatttttgtttattagaatttaattttgcgacacttgaaattgaacgtttaattgcttgagttgttgatttatttgatttttcatttataaatttagttatttgttttggttgtaataataataaacaactcaaaattccataataaattcttggacaatatttataatcaatttgtttatataagaaatcaaacaatatttctgcatttttagagcacagactatgatcaggagctttaataaaatcatttgttctataaattgcccaacttaatattgattcagtgaaaaaatgtaaaagtaaacttcgttgtgaatttcttttagttatatgtaaaatatcttttataaattggatattagcattaaatttagcagttgttatgaatgaaaattgaattcaaatgagaacctttaatatataaactttcaacattgatatgtttgaaaaattaatttttcaaaatttaaatattgtgattgattagttgcagcaatatataataaaattgaagatactgattcatcaattattgaaactatttcataacttttcaattttgatttttgtagtagtaatttcttaatttcattaaaatcatccagagaagttgaagtattatcaatagtattattattatcattaccagtactgctactactttcatcaattaaagaggaagttttcgataattctgaaataggagtataagctagtagatgcagctttagatatagaatcagcagttaaaaattcagttggagataaaggattatggttaattgaatttaattttgaagttgataaagaaattgaatgagttggttcagtaattttaaataaagtagttaaacaagttgaatcatttttgaaacttaataataatgataacaattttgtacataaattttctgacagtattgaagtaggagttgaagataaatgagttttaaacattgttgtagttgttgttttcataccacctctactaaatatactaccatttaattgagataaagtatcatttgattttaaatgatttaaaaagctagccagtagattaataaccacacataaagaattaagagtattgacacttttatcatataaagattttgaatttatatcatcagcttttaaaattttaattaataaattataaattgaagatactaaatcattaagataattttgattaaatgataatttcagcagatgagatttaacttgaatataagttggatcagctaatacttgatcatatgaaaatcttgatttataaggtaatatattatcaattctagtaaacattacttcaataattaaattttctatgggtacaaattctaaattaattttagataaatttccaactctagttgaaatagataaatctgaactcagagatgaagaagtttccattgaagaatcagtaattgaagtagtatttgacattgtactactattattattattttaatactatttgaaattggggaagaactttgagatgactgatttatgtgattagaggatatccctgatgattttatcaagtcttcctttctcattatttatttatatgtatatatatatatatattactatatatacttatattataagaatgaataccaatagctataaacaatataaaaaacggataccaaaatatcaaaacagtttatgcccagctattaaattaataagtcttcaggtgatgagcatttccaacggctgttaccaaatgcaaaaaaattcgccactgaaaataagagaaaatgcaaaatagggcaataaacccaccgacgtatcgacctgtatttttataataaaaacaaacgcgatctctctaagttatgttatgtaaacaaagttggcaatcaatgtaaacaaagtgatctctccattagcctagcatgttttcatttcaattgctattgctatttccattttttatttttatttttattttcttttctatctcccactttctctttcattattctctatattggtaatcgacattgggatagcataatatatcatataggttgatcacttttatcacttttctaaatgcttaactcatctccttcaccatccaaaaataatattatggatgatgctattgatgctgctttaaataatcataatagtactagtaaaatctaacaatcatttagaaccaacaatagatcctcaattacaagatgatgtagtggaatcattattaactactttaaatcaaaatcaaataaatacaaataatactaataatacccccggtcccaaacatttaagaaatttatcaaatagtaataataaaatcccattcttgccaattcaaaatttaaatatgaataaatataataataataataataataataataataataatatcaattcaactaataatattgataacttcaaattttcaatggaatcaccaaattttgattcatttataacatttactccaactttattaaataagaaaaatactaatacaattaatgattcaatattttcattctccccaggctttatcaatggcatgaatatgaatatgaatatgaatggtatgaacatgaatatgaatatgcaaaacactccaaataataaaacatttaatgttgaagatttatttgacactccatatattaacaatctttattcaactattaataatcccaactttacataataatattaataattcaacaataaaatcttcatttgatacaccaattagtaaactatttgaaaaaaattataatagtagcttaagaaatattaatattgttagtagtaatttaaagaatatacgagattttgaagagaaaagtgtttcaccttgtgataatcataaaaaaaatttaattaatgatgatgaattaatgaaaaatttagatttaaaaacaatgacaagtacaccaagttgtaaatcaaagaaatcaattaacgacactaatactaatactactaataataataatcataatgattcaattgattcatcaccatcaacaattataattaattcagttactaaagttactggaggtgttaatttaattgaatgttcaccaacaccagataacaaagatgataataaagtacgaattaatattaatttattaagtaataatcatagttcatcaacaattatttctaataatacaataaacacagtaaataataacaatattaataatacccacaatagttcaataaatacatcaccaccttcaatacctgttatgggtattttcaaagaaaatgatcctaaggataaaataaagaaacaaaaacaaaaacaacagacacaacaacaaaatacaaatgataaggacaatataaaaaaatttagatatcaaaattcatttaatgataaagagaataagaataaacgtaaaaatcatggtaatgataaaattcattttataatggcagatcctgatcaattaaagggtaataaacgacgtaaaaaagttttgaaaaataatacaaatatagttaataatcgtattaagaaaaattcagagagtaacaatatctttttagaaaataaataatacagtgtatattattattatatattagaataacaatactatctacgttttggacctttaggtttattaaaacgaagtgaacgattatcagttggagttggttttttggtttcaacttcatcttctaaaattaattcatcaggatcaccaatttcaatatttttagtaaatgtataacctaatttggttaaataattaacaaatgcatttttatttgcagctaaaaacattctttgtctaatatttgaacctgaaggacatgaaagtatgaaaaaattattataaatataatatgatggtgaatcagttgataaaaatgattgaatattatcaattgaacaattagatgatgaatttaattgaatattttcattatcaaaagttatatgttgtaataaattctcagtttgaatatttgattttaaagtttcacgtatttcatcaggtattgaaaataataatttactattattatcattaacaagtcttgcatttgaacttgtatgtataggtttatcaattaaattctcttcatcctctgaatttgcaatttcatttgatttaacaggtttaataaattgatcccaattaatcaaatcattttcatcattagagaataaaatttgtgagaaatgatcagtacctaaacctcttaaaagtgcatttctcgtacttgcatataacattttctctcttactggtgttgtatctggtatatatgaaacaaatacatgtttattagcattgtagttatctgatgatataatataatgagcatttgaatgattaatgttatttaattgatattgtgatgcatctaatgataattcatcgttaatatgaataatcaatggtgtttgaggtgataaaagatattctttaaaggaatttaaagttgaattagagggtgatatacctgattgtgccattgattttgataattttagtgtctattccagtaacaaaaggcagaagattgtatgataattcatgataccaatgccgtgattgccgtattaataatattaagctcgcgataataccactctcttattataggaaaatatttcatttccatttccattgacacttcctctaattaattgttctcttttgttcatttccttaatattctcttctatacttatagataatggatcacagtagttcgggtatgtccaatttgggcaggaacaatgtaccaacattctctccaactccttcaagagttttctcaccaaccatttcaccacaaccatttctcaccacaaccattttcaccacaaccattttcaccacaaccattctcacctcaattacaacctcaacttaataaccaaagtcataataataacaatagtcatcataatcaaccattttcaccacaacagacattctcaccacctttttcaccaccaacattcacagatttaccacctttccaacctgaaacagagctggctcttaatacatttacagcagatttacagacttttgcactttggttaagaggtttgacacctgaacaacaagttgcagctgcggatgttttagctgatgcattacctcaaagaaatacaagatcacgtattgatatggttccaaatagacctctaagtcctttattacttgattcaatgttatcattatcattagaggaatcattatctaattctactactaccaataataataacaataatagtattaataataatacttcaaatattcaaatacatcatccacaaccgaatactaataatttgaaaaatttaactaaaaatacatcaaataattctcataacacacagaaattaacaccatcatcaggatcagcacctgcatcagcatctgcatcaaatggaccatcacagttaacatcacttacattattagaggatattccacaatggttgaaaactttacgtctgcataaatatacatcatcattatccaatataccatggcaagcccttgttcaatttgatgataatgaattacagaagagaggtgtatccactcttggagctcgtaataaactactaaagagctttgccattgtctgcgctgagcgtaaggaagacattgccacctataataacagtaataacagtaataacactaaataacttatgtaatcaatataatactaataattactaatattttgaataaactccccctccctctcaaatattgcacatggcagtgagactattaaataacaaattatcttactttacagcatgtttatcttctttgattgcctttttctgctatcctttaagcactgttacacacaattaataccacaatatgtcacatcattctcatattataagctacggcttcaataggggtgtaacagatactttaaatataccttcattcaatagtaaaattgaattatttacttatttacttaattatagtacaaatattgaaatcaatagtcaactagttatttatttaaataaatcaaataagaatattaatattgatttatttggcaaatttattacattatagattttactatctttaccccatcataataccctgctctgaaataattattgaggataaatcttcaataaatgatttaattaatactcgttataaacgtatcctttattggatttcatctgatattgaaaaacctttcactatttacacatatattaaagaaaatttaccatcaatagataaaagattattagttgattcacttattgatgatgagatgaataatactactactactacagataatacttcacaaaatatttatgaaagattatcagatattaatcattcaatagataataaaagatcatttaatcaattattaaaggaaagaatgtttttcgatgaagaattatcaaaagttcaatatcgtcaattactaaatataccaaatgatgaaacttattataaaaaattaattaattcttgggaatttaatgcatttcaattttcttcagatgaattaatttacattgcttatattatattaattaatcatataactaatgataatgatgaaaataacagtatttcaaatcatttattatcattccttttctttgttagggataattatagaatcggtaatccatttcataattttagacatgcaattgatgttttacaatcaactaattatttcataaatcaattaaatttacataatgataaaaatattagtagtattgatattatttcattattatttgcatcattaggtcatgatattggacatccaggtattacaaatatgtatttacaaaaaaataattgtcgttttatttattattataataaattatcaattttagaaaattatcataatacattatttcaaaatattttacaaccttttattaaaaatattaaattaaatttaaatttaaatcttatcaaggatgcaattctagcaactgatatggcaaatcattcaaaatttgttgaaaaaatttcaaatgaaattaatgaaatttctaatacaaagaataataataataataatgttaaagataattttactttattagcatgtttattaattaaatgtgcagacatttcaaatgtttgtagaccaattgatataagttttaaatgggggaattcgttaactgatgaatttgaacaaatttccattttagagaatactgataaagttgaaaatttaccaattaatgttaaagattttaattataatttattatcatcaaaattaataaatgattatccaaaattaccaaataatcaattattctttattaatacatttgctaaaagtttttttgaaaaaatttcagtttcattaccacaattaatatttttacataatacattatcatcaaacacgatattttgggaaaatcataaagagaaaaaagatagctaatacgatgatggtgatgatgataatgatgatagtaatagatagctgatagatagaatatatagattattatagatataaattttgcatatagtaataataacccttgaaaaagtacaagttaaagaaaatagattgagaagtcatagaaatgtagaaaagtgacttctcagttccaccgtttgtgactcttacacatttaagtacattatattgactctgtccctttgcaataccttaccaccttctttaaagatactgaatcctctttaaatggtgatattggatataatagttttaatattatcaacaacacttgttcttttctataaataatatcgatatataatcaataatcaataacaatgtttgcattaactagaagtatcagatttactaaacaaaatttttcatcatttaaacgtttacaatcaacttttaaattaaatccaaattcaattgtttcaacatattcaaaatctccaattgttaaatttacaaatgaacatgaatggatttcaattcatccagatggtacaggttttattggtattactaattatgcagctgatgcattaggtgatgcaacatttattgaattaccaactcatcaaattggtgaagatgttaaaattggtgatacaattagttcaattgaatcagttaaatctgcaagtgatatttattctcctgttgaatgtaaaataattgatgttaatcaaaaattagacgacaatccagaattattaaatgttgatccaatgggtgatggttggattgttaaagttgaagttacaaataatgattcatctgaattattagatgctgataaatatgaagaattcgttaaagaagagtaatcttttctttttatttttttatataaaccttttctttctttctttatacagttttttttatatattcataaatctttacttatccatttcacctatcatttttactttcctcttcaggtgttttacaaacaatttgaaatccatgaatatcaggtatttcttcctttaaaataccgaaaactaatctatgtctagctaaacttttcatattttcaaattctttacttataattgtaacatgaaaatgactttcaactgtattacttgcacctttcatacctgaatgatgtgcatgtttccatgaatcattacgaatttctaacttatttggatttaatttactatttaatctttcacgtatcttagattcaattggtccacaattatatggtggtggagttttcaaaccacatgattgcatagctctaagtgatattctcatatagtttttgtataaaatgtaaaagaggttgaatctacaagttggttaaattggggtaatatacagtgaaaataatttaattttacaatcttaatgattaggtaatatttttccaataaatatagtcaatcgttcgttatacatcaatcaatggttcaagatagctatataggtatagaaattagtaatcgttattgccatatgaatcattgtttctgttactatatgaatcattaccatatgaatcactgtttctgttactataagaatcattaccatatgaattagaattattgttatttccataagaatcatcattatttctgttactgtatgaatcattaccatagttactgttcattttgttagatccataggaatcattaccataggaggaatcattattattattaccataagaattgttcttgtttgaaccatatgaatcattattgtttgaaccgtaggaatcagaattctttttgttagaactataagagtcgttaccataagaatcgttgttgttggaaccatatgagtcattgttagaaccataggagtcgtttttctttgaaccataagagtcgttgttgttggaaccatatgagtcattgttagaaccataggagtcgtttttctttgaaccataagagtcgttgttgttggaaccatatgaatcattaccatatgaatcattgttgttgttgttagaaccgtatgaatcgttaccataggaatcgttattgttggaaccgtaagagtcgttattgttagaaccgtaagaatcatttttctttgaaccatatgagtcgttgccataggaatcgttattgttggaaccgtaagagtcgttattgttagaaccgtaagaatcgttcttctttgaaccatatgagtcgttaccataggaatcgttattgttggaaccgtaagaatcatttttctttgaaccatatgagtcgttaccgtaagagtcgttattgttggaaccatatgaatcgttattctttgaaccgtaagaatcgttaccataggaatcgttattgttgttagaaccatatgaatcgttaccaccaaatgagtttttactttggtaattagaatcattattaccaaatgattgattattatcattattatgattttggtttttatgaccaaatttaccaaacagttcctttgccttatcaccgtattcctttactttatcaggattttcatcataatattgtttagcttcattaaatttttcttttgcatcatcaaataaacccattgtgtattgtgtgttagtgtattgattataggaattgaattatagtaatgtaaaaaagaaggaaagaaaagaagaagagatgaaaagcccaatttcaattaaatggagaacattaaccccttttataaaacgtgttattaaaatcgatcatcgatcaaagtgaaatatctaatgactttacttagccaccagatcgaagcttttttattcgtacaacaatttctttctctatttcctattgttgattgaattattactttatgtccgtaatattctataattcaagtctagaattaatactaataacatctacaatctgtattacacaccatgtcttacaatcactcatatacagctttgcattatctgctatatcaccattaaggtgtacttcctccatgaaaaccataaaaaccataacaaaacccacccatccaaccaacctcaacctgtccttctcattaataaaggcggataatgaatcttccgagaagtacccgtaaaaatcttttgattttccgggaatagacgcgactatggcttgattactcaaaagagtaactgccccattaggaataaggtaaacacatgaattatttgatcctggctcttcccctttattctcttttcttaaaactgcattttttttgttattattcaaagatttttataacatttggctgtttcaagtaatagtctattggtttcatacttttgtagattaaaaagttttgatttcctatatattcatctctcagaaaaaagcaaccaaattatacttataattactaattaattaaacaataaattctattctatttcttatattaatattacaaccctttcacagcatagttcgattaaacctatttacgtaatattaatcattataatatagtatacaagacaagattaattcaatgacttcaccaataaggaaaacaccaagtgcaacaactcctaaatatcacagaacaattttcggtaatacaagtccaaatttagttaatcaaagtacaaatagtttatattcaaatactaaaggtattttatcacctaactttaatattgttaattcagattggaataatagttatggttcaaaatttaaaccaaattctaagaaagttacaggatcagtaataggatcggctccatcatcattatcttcactgaggagatcaagttttaataaacgtcgaacttttggtgatatatttaatgaaaacaataataatagtttatttgaagattcaggtaataaaaagaaagtaaaaactaataataataataataataataataataataatagtggtaaatcacataatgaccttaatgatataattaatacaccaaaatctaaacttaataataccaataccccaattacctcaacaagaaaattacgtcgaactaatacaaatgaattattagatagatttataccaaatagacaatcaacttcaggtaaattatcaattgaaaagacaaaatctttaccttcatttgcattaccttctgatcatattgatagtataacaagtgaaatttatcaaaattcagttgctgaggcatgtggtttagaagttggttcaagaattttacaatttcaattaccaccaccagaatctaataataataataataataataataataatggtaccactaataataccaccggcacatcactgagaagagtaacatcatataattcaagtttaaagactagacaaatgatttccaccaatgcagctcaagctagaatgaaaaaagttccattatgtcctgagaaagttttagatgcaccaggattaattgatgatttttatcttaatttaatttcttggtcaaatgaaaatttattagcaattgcattaaataaatcagtttattgttggaatgcaaatgatggtaaagttaaattaattactgaatgtgaatttataattacatcaattaaatggtcaccagatgattattatttatcaattggattagataatggttcaattgaaatttgggatattgaaacagttacaaaattacgtacaatgaaatttaatttaaataatagaatttcatcacaaagttggaatgaacattttttaacaattggtttaagaaatggtgaaattttcaataatgatgttagaatttcaaatcatttaacaaataaatttgagaatcatttaggtgaaatttgtggattagaatggagaaatgatggaattcaattagcaagtggaggtaatgataatatagttaatatttgggattataggaaaagtaaaccaattttcactaaaactgcacataatgcagcagttaaggcaatttcatggtgtccaacacaaactaatttattagcaacaggtggtggtagttcatgtaaaatgattcatttttggaattctaatacaggttgtagaattaattcaattgaaactgagagtcaagttagttcattacaatgggggtattcaaatggaattggtaaagaaattgttgcaactcatggatatccaaataatgaaattggaatttatagttatccaagtttacagaaaactggtgttataattgatgctcatgagagtagaattttaaatagtcaattatcaccaaatggtacaattttagctacaattgcatctgatgaaaatttaaaattttggaaaattttcgatgaaatgccagtggttaaaaaggatgcatttactacaagttcaagtggtaaagacatgggtaaagttatgaccattagatagttctatatatgatcaaagtgtataataatttgtaacaaaatagaatagaataaaataaaataaaataaaataaaatgaaatgaaatattaaaatttattgataaaataaaaatttcaatataattaccatattaggaaggtgcagacgaatagataagaaaatatttccagtattcatacacccttagatcatcacaccgcggttaatctactacttttacagtgaaggtatttaaacactgtagagtcctgtaagtaatggattatgtaggtagattataatttatatatgatgaaaaaactttttcttcttaaggcaaagtcaatatgagtaagagagatattgaaatattagaatttaaagatgctaaaagagcagctagaacattatatagagcatttgataatgatgatgtcgctaaatatacatcacgtcatttagagaatgatccagttaaaaggaaagaagttgatttacaattatatgaagcatatattgtatcacatataatgaaaggtatagtatttggtattaaaggtgataattttgaagagaatgattgttatgaaactgtttcactttgggttaaacctgattctggtgcattagatgattatattacattaattagatcaggatttgctaaattagcatggaatacaggtagtgaaggtcgtagaagagttttcaaagttttatttaatgttttacatgataattatcatgaaattatgaaaattgatccaaatgaggaaaatacttggactttagtttatcttggttcaatacctgaaagtagaggtaagggtaatgttagaaaaatatttgattatgttttcaatcattatattgatccaatgaatgctaatacttatttagagagttcagctgttcgtaatttaccaatttatgaaaaatttggatttagagcagttagtgatatttggttaggtgataaagaagatcctgttgataaggcaagaatggatattatgattagaggacctaatggtagtgaatggaaatatttaaaggaaactagagaaaaatttgggtatataatacctgaagtttcagttgctaaataagttagtaatgtttttatagttataataaatttattatgtaatcaatgcgaaatgaagttttaaactaaggcacttttttaggttttaattctgaactgttgagtttgctatacagtttatttcttactgacaagaacaatgaataacgaaatacatagcataccatctagttttaatagtgctgctagtggtggagctagtagtaatataatgaccaatcccaataccaagcccaacactaataccaataccaatacaaattataattatgaatcatcaattaatgataaaatggtatttacatggataactgaatttacatatggtccaaataaggaacaagcattattagaattaggtaaaaagagagaaatgtatgatgatttagcattagttttatggaattcatttggtgtaatgtcatgtttattagctgaaattgttagtgtttatccaatgttatcaccaccaacattaacaattcaaagttctaatagagtttgtaatgcattagcattaatgcaatgtattgcatcacataatgatacaaaaaatttattccttgaagctcaaataccattatttttatatccattcttaaatacaacttcaaaacagagaccatttgaatatttaagattaacaagtttaggtgttattggtgcattagttaaaaatgattcaccaaatgttatacaatttttattaacaactgaaattataccattatgtttaaaaataatggaaaattcatcagaattaaataaaactgttgcaattttcattttacaaaaaatcttattagatgatcaaggattacaatatgtttgtcaaacttttgatagatttgatgcagtttcaaaagttttaaatacaatggttaaacaattaattgaacaaccaacaactagattattaagacatttaattagatgttatttacgtatgtgtgataatgttgaagcaagaaatacattgaaaaattccttaccattggaattacagaataacactttcaaagaactgttaatggaagatgaaggtgctcgtgaatccttacaaatgcttcttaatgtccttaaatagtgtatagtgtaatgtaacgtattacgtaataaataaatatatgagaaaaccaccaaattttaaaattggccaccgcattaatatttccttaagtgctcagcgatttcatctcttagagggaatatataaacattgatttaatattcatactcctttgattgtttctgaatcaatcactatccattcttcattgcaacaatgtctactcattcatacaagaagaatgatgatgcagattcatctgtattaccagataaaatgtcggtttatcaagaatgtttacaagcctgtaatgcatcaccaattcaaccaaagaaatgtcgtaaattattatccaaattattaagattattctattctggtgaaactttcccaaaaactgaaagtacaagtttatttttttcaatttctaaacttttccataataatgatccatcattaagacaaattgcttatttagcaattaaagaattatgttcagtatctgatgatattttaatgattacagcttcaattatgaaagatattcaaaatggtgataatgtttataaaccaaatgctgttagaacattatcaagagttttagatggttcaactattaattccgctgaaagattatataaaaattgtattgttgattcaaatcaatcaatttcttcatctgcattagtttcaagttatcatttattaccaatttcaaaggatattgttaaaagatggattaatgaaattcaagaatcaattgttgctaataaatcatttcaaacttcatcttatacaactcatgaaactaataattacaatagaattccaaattcaacctatatttatcaatatcatgcattaagtttattatatcaatttaaaagtaatgataaaatgtcattaattaaaatgattcaacaattaaatgaaagaaaaactttaaataattcattagcacaaattcaaatgattagatttattgaaaaattaattattgatgattcaaaaattttagttaataatcaattatggccattatttattaattggcttaataataaatcagatatggttgaattagaggcatgtaaattaattttatttaatgcaaataaatttaattcagaacaacaattacatgcgattacaactttacaatcattattatcagttccaagaactgttactagattttcagctgttagaattttaaataaatttgcaattaaagattctgataaagtttcagtttgtaatttagaattagagagattaattaatgattcaaatagatcaatttcaacttatgccattacaactttattgaaaactggtaatattgaaactgttgatagattaattaaatcaatttcatcatttatggatgaaatttcagatgaatttaaaatcattgtaattgatgcaattagaactttatcattaaaattcccattaaaatataaatcaatgttaaaatttttaaataatattttaagggatgaaggtggttttaatttcaaaaattcaattgttgaagcaatttttgatataattaaatttatacctgaatcaaaaccaattgcattagaaatgttatgtgaatttattgaagattgtgaatttactgaattaagtgttagaattttacatttattaggtaatgaaggtccaaaaagtggaaatccttcaacttatgttagatatatttataatagagttgttttagaaaattcaattgttagatcaagtgcaattattgcattatctaaatttgcattaattaatgatgaaaatttaactaaaagtattaaaattttattagagagatcattaaaggatatcgatgatgaagttagagatagaacaattttatcattaaagttattaaataataatgataatttaaaggacgcaaagaattatttattaccaaattataaatattcattaccaatattagagaaagaattaagtaaatatgttaataataatgataaatcatcatttaaagaatcttttaatattaatttaattccaaaaatttctgatgaagaatataaagcatttgaattaaaggaaaaattatcaggtaaattaaatgaaattgagaaagaatctgaaattaataatgatgaaaataatagagatgataagaataataatggtaaagattctagtaatagtaataataatagtaataatagtgatgatgaattaattgtttcagatattactaaatatacattattacaacaacaatatcaaagtgaattatctcaattaccagaaattaatgaatatggtacattattacattcatcaaataaatttgaattaactgaaaaggaaactgaatttgttgtttatgcaattaaacatattttctccaaacatattgttattgaatataatattgaaaatacattagatgaaattattttagaaaatgttaatattaatatggaaattgataatgaagaatatattgaacaattttcattaccgattgaaagattagaaccaaatagtaaaggtaagatttatttaagtatttcaagacctgaaaatgataatgaagaagataattatataatggctaatattgttaattcattatcatacattagtaaagatttagatagtgaagaaggagatgaaggatttgctgatgaatatcaaattgaagatttattaattacaccaggagattttattataccaacatttacaaatgattttactaaagaatgggatgaattaagtattgaaaatagttcagttttcaatttaggtaatgaaaattcagttaatttacaagaaacaattaataaattaataaagaatttttcaatgatgccaattgaaaatagtgaaataatttcaagtgggaaaaataatcatacattaaaattatttggtaaaagtattttaaataagaaaattgcatgtactgttaaatttgctgtaagttcaaagagtgttatgatgaaattaattgttagaggtgaagaggaagtacttgttgaagaacgttcaaatactattgaataaatagagtaatatgtgtaattaaataaagcaaaaataaaaacaatctataatttaataagtttatttattataacaatttatttaacatttaattatttaacattgattatattatatacaagggaagaattactgtctattgattcatgatgatatttaaatttcaaaaccgaaacctttcatacaagttttataagcagcaattaatggttcacattttggtgaatcaacatccattaattaataaacattcatctcttgcagatttttcaggtttacaaacacaacatggttttggtttagctgtttgaaaaatgttagtatgatgcttttcctttatcacaactcattctaatacatacattcttgtttcttttcttcaggacattggatagttattgaaagagaagaagaagaagaagagatgtgtagaatcaaaagagtaaaaagaagaagcatgccacagtggagtcagttattagtaatttgcatgattaatataggtgggtggcgcagtgtttttttgtaattaatatgtggcgcatgaatcgtcattattatagagtatagacccttttcattattattattacacttcccattgaataacttctatctttattaattaatcttatacaacgatgccatcagatagggaagaatgtgaattattaggaccagttgcattaactgtacagggtgtattaggattattatcaatgtcatcattattatacaagagaatgaatgagggacctgttaaacgaccttttaaaatttgggttttcgatgtaagtaaacaagttattggtgcttcgtttatacatattcttaatttggtgctaagtataataagtaagattaaattgataagttcattaagtattaagaaaccaaaatggagtgatgataatccctgtgattattatttccttaatatattatttgatacgactattggtataccaatactttattttttcattactttaataactaaaatattaataaggtttaatgttagaggtgttaaatcaggtgaatatgatacaccaccaaaattagttaattattttaaacaattaataatctatttatgttcattaggattgatgaaagttagtatttattatattacaatgtgtttccccatacttgttaaaactgcaatttggttactctcaatatttgataaatatccaaatactcaaataacttttgtgttattaatattcccccttataatgaatgcattccaatactacgtggtggataatctcattcagagtcatagttattacaaagtgaataaactcatacatgaagaagaggaaggttatggtagtgtatagtgtatagttagagctgagccgaggaagcacgtgcagcggacttttgagaatgcaaaggggggaaaaaatgtataaaagaggacggcgatcccattttatttattattgtgtaatattgtttagtgagcttttctattgggtagatactacgcacggagcattatcggagtacattatgagaggcacagtgtttagattaaacttatcatcattattagctatattaacagtattattcttatcatattgtaatgcatttgaacaagatgttttagaagttactgataagaaaattggtaaaaattagtgatagtaataagaaaaatattattatgatggttacagatggaactggaccttcaagtattaatatggctagatcatataatcaatttattaatgatttaccattcaatgaaactctggttttagataaatatcttattggacaatcacgtacaagatcatcatcaagtttaataactgattcagctgctggtgcaactgcattttcatgtggtttaaaatcttataatggtgctattggagttgattcaaataaagatccttgtggtacaattttagaagcattaaaattaaaaggttataaaactggtttagttgttacaacaagtttagcagatgcaacacctgcagcatttagtgcacatgctgaatttcgtaatatgctggatttaattgcaaatcaacaattaggttataataatacattaagtaaatttgatggtgattcatttgttgatttaatgattggtggtggtagatgttcatttttaccaaaatcagatactgaaaatagttgtagacatgatgaagttaatttaattgaacttgcacagttcaaatggattggactgtttcaactgatagagaaggttttgatttattagaactaggtaataatgaaaatattaaattaccaattttatcattattatcatattataatatgccatatgaaattgatagaaatgaaaagaaatttccaagtttattagaagaaacaaagactgcattaaatattttatcaagagagactgaagattctgatgaagggtttttcttattaattgaaggttcaagaattgatcatgcaggtcatcataatgatccacatgcacaagttagagaagttttagcatatgatttagcatttgaggaagttattaaatttgcacaaaatagtgatgttgaaacatttataattagtacgagtgatcatgaaactggtggtgcagatattggtagacaaattaatgatgattaccctgattatgtttggtatcctgaagtattagcaaatgctaaaaaatcaggcgaatatttgaattttaaaattagtaaatttttccaagatcataattctagaaaaggtatgaaattatcagatctggaaaaatttattaaagatgaaattattgaaaaagatttaggtattttagattatgaaaggaatgaaattgatacaattctgtcattattaaagaaagaggaaaagaaggatgaaataaatgaaatgactgaaattgaatcatcatctgataatgatgaaattgaaattatcattgaagaagttgatgcagctagtggcgttgttgaatttttaaaagatatggtatcacgtagagcacgtattggatggtcaacacatggacatacagcagcagatgttaatatttacggttacagtaatactgatagaggtatgaaggaattaagggatgcattaggtggtaatgttgagaacactgatattggtaagtttatggaaagtatcaccggagttgatttagacagtataactgaaaaattgagaatatgatgacataatagaatagaatagaatagacgcgacgacggcattacgtaaacaaccataacaaatgaaaaaaaaaatagagaattacccgattgggccagcatgtttacgtcttacccttttcagcagggagatggcctaattgggcagagcgaagtatcccgagtggggacagtatctgttgcgtgaggactttctgctggtttatataacttttgtgtcttgtctgttttggaaattaattaaattatttaaattaactctgtcttcttcctttccaatttgtaattaattattcttttttatttcattctattttaacaagtaaaaaaacacttatatcaaacaatacaaaaatgctttcttacggtgatatctctcttagaattgttaatttcatgtttttaacagttggtcttggtttaacagcttcattagctgcaactaaaattactcataataatccacaagttaattattgtgtcttcgtttgtgcttggggtatcctttcatcatcattttatggaattgttgcattctttgttcaattccttgcatctccaattttcttagcaattttcgatttcatgaattttgttttcacatttgctggtgcaactgctttagctgttgcaattagatgtcatccatgtactaatcaaaaatatttagatgataataaagttactcaaggttcaaaggatagatgtagaaaagctcaagcttcagttgctttcctttacttttctgttttcatcttccttttctcattaattatgcaagttttaaatattgcaaagaatggtttctttgcaaattcaactccaaaaactccaagaactggtgttccaactatggctcaagtttaaaatttttgaaattaattttattttcatttaagttattaaagttcaaaattatttaaaataaaagaataaaaataatttttttgtcacatatactattcatttcaacttatttttattacatcaattttaatttaatacttaaaaagatttaatttaattcaaattttaacaaattatccttgattcccctctatcactactattaattccaatttacaaaaaaaacacaaacaaataaacaaaaaaatttttattttcattcatcaattaattgttattattactattatattacaacctttttactctatttttctccgtttttgttattgttattattttattttattttacaaattttatttttatcaaataactctttaatttaacttttttcttaattttatctaccttttttataattcacttatttaaagttatttaaaattgtataattataattatatatctactaaattttcatacctttgttggtgatttattacagataattgttattactaatacaatgttttatttgtgttttatacaatcctaatatttttgttaacgggaccggcagaaacaatagaaaattcagaaagaaaaaaaagtttcaatccgcttacataatcatttatcatttataacctcttgataacataaacctttcaactgattcccataaatgttcagaaatttgtctatccttaaacctttgatttctatctaaacttataatttcaacattccaatttttaatattattaggaattaaatcaccattataattaatataaaatcctttaactttttgaaataatttatttggattattaattttatatggtttaaattgccattcttgacctgttgtgaaaactgcaacaactctatcccaatattctggtttaatgaaaaatttctcaacattattaacaataacaaacttaatcttcttattgaatcttttactatcccttataatattaattatatcaatattattattattaccatgatcttcattaattttatttgaatcaataaatttaccatcttgtaaaaatgatttaacattattcatcgttatcattgatattgctgatggtgataatataataattggatctttcttatgtaatatagttgataatgatgcatcatgactaatttcttccttctttgaattactactaccactaccactactaccagattttttattaccatcttgactcttcaatactctaataattttaaattcactctctcttactaaattagaaaaatcattattcttttgactaccacgtaatgttttattatgatcaattaattcaacttcatgtttattaatctcttttaataattcatcattctcaattttttgttttttaatctccttataatcaatcatttcatctttttctaaacttttcttcttaagatttttttcatcagcttttctcactttacgactactactatccttacctccttcaactttatcatctcccttaacatattcacaagtttcaatatccccattgatatatgaaattaaatcagttctctctaagaaagtaataacaggtatctttgcttcctcacatttagcaatataatcagtaactgttgcatccttatggatccaacagaaataaacagtaccaatattataactcttacttgcttcaacaccactttgttcactcaatgaatatttatcctcatttccatcgtttttaccctttatcataacattttcagaactaccaatactactaccatctaattcaacactatatccattcttaactgctaatctaagcgcagaaacaaacttcatcactctttgccaaagagaaacatccatgctgcagatcgattcactctgcacatgttcatgttgaaagatcaaaataataatttttggagagaacccagtcgcgtcggttgattatgtcatctttttttaaaaaagggccatttattatcgtgatgagcccgataagaaggttttgacagtattttattaatcacaacagtctttctttcaatttgataaagcaatcatgtctggtacacgacacagttttttttcaagggttttgggaggagatagtaagaaagaaaacaatggaccgtttaataatacatcaaataatgaagaaacagcttattcaaacacttattcttatatgaatgataatataatgaaggaaatgttattatcagaaatatcattgaataataatcaattcgaacctcaagtgatagttgaggaggaaagtgttgggaatattaattttaactccgaacatgaagatgaagatactgatgaaagtgacgatgataggtgatggtgaagagagtagtaataaaagtaatgacggagttccagatttagaggcaaataggttatctaaaacagataagaatagaatacgaaaacaattagaagaggaattggaattaggtaacgaatatgatgatcaatatggttatgaaagtgatgtagagataggtatgctacaatcagtttatcaacaagttgagaaagttaaacaaaatattggtccaatgactcaaaaagttcaagaaactgttaataattcaatattacaacctcatatacctacttttataagtaataaaaagcaaacaattgaagaaaatagaagacaatttatgaataccaaaaaattacctgcaaaggaaagagcactgtggatgtgggctaatatagttaatttagatatattcctcaatgatgtctatgattattatatcaataatggatggaattgtattgtcttatcaatgatttgtgattcattgattgttatatttgttatctttttaacatcatttatggggaattgtattgattataataccttatttaatgagaatgtcaataaattatcacaagtttatgatggtcaatgttatgctaaaatatcatcaactcagaaagctttttatgtcctattaggtgttttattactgttgaaaattaaaaattcaattaataatttaagagatttgaatgaaattaaattattttataactatttattgaatattgatgattcagaattacaaactattagttggccttcaattgttaaaaaaataatgattttgaaaaatcaaaataccaatgcctttattaatgataatgataatgatttgaaatcaaaggaaaaattaaatgctcatgatattgcaaatagattaatgagaagggataattatatgattgcaatgtttaataagaatatcttaaataagagtttaacaataccttttctaagctctcatttcttaacaaagacattggaatggaatttgaaattttgtatatttgattatttattcaatgatcaaggtcaaataaaggcaaaagttttgagtcaacatcaacgattaacattgattatggagttgcggaaaagatttagaatagcaggtttgttgagtttgatagtcactccattcttagtgatttatttcattctctactattttcttaaattattttatgatttcaaaacaaatccgggattattaaatgcaagaagttattcaccattagctcgatggaaaatgagagaatataatgaattaccacatttatttgaagaaagattgaatctgtcaattgaatatgctgatgattatttaaatcaatttcctaaagagttaccaaacatattattgaaatttgtatcatttattacagggtcaattgttacaatattagttattctgacaattattgatagtgaaaatttccttaactttgaattaactgaaggtagaacagttttgttctatatttcaacattaggtgctgttttcacaatttgtaaaaattcaatatcaaacaataataataaatatctgtttaatcctgaaacttcacttaaaaatgtttcaaattatacacattatttaccaaactcttgggaaaatagatatcatacagttgaagtcaaaaatcaattctgtgatttatataacttaaaattaactttgatatttaaagagttgttgagtttgatcctattaccatatgttctttacatttcattaccaaactcttctgataaaataattgatttttttagagattatacaattcatgttgatggtattggatatgtgtgcacttttgcaatgttcaatatggagaaaaacaaagatcatgtaattccaaataattcaaatactacaaatgataaaatggttcaatcatacatgcattttgtcaaaagttatggaactaccggagtaaagggaaccaatacaactaatggagctttacatagtgattcacataaaataaataatataaagtttagaaatccaacacaaaatattattcaaagaaatataccaaataataaaagtaattcattacttaaatctacattattgaacaataggaaacgtaacattaatggaaatggtggcatttctaaaatgaacaacagtgatgataatgaagaagtagatgataatggaattcatgaacaaatggaagaaactaatgccgggttatcccatgcaatgaattatatcgatgatttaagtaatagtatgatgttaggtgaaagttatcaaatgggatatatgaaacctacagataatccaactacgaatgatatcgaagatgaaactaatgataagagtagcggtggagttttaggattattgaaccaagtttataaacataaataaataaaatattcttaatataacatgattattttctattcttacgagctttcttctctctttcatattcattcttagctgtaccttcttcagtttgaatagagttatagattttagccattttactatgatattcatcatattctttcttctttctttcgatttgtgctcttgcttcaaacttagtatctcttctaatttccttaagtgcttgtttacgttcttccttaacttcatgtttcaatttattaatttcatctctaatagcaattggatccattggatccatatcaattgatctacttgatttactatcaggattaaatctatcactaaatcttggtgcaacttgtgcaataccaattgcacgatgtgtttgtaattttaatggacgacgttcttgattagaaattctgtaaatatttgctaatttattacctgtattgataattatactatttgtttctgaatgtttaattaaatgacgtataattggaataaatgataatgttaattcaggtgctgcagttgtatttttaatcattttagtaataagtgtatctaatgtttgaactgatttaattattaaatgattaagaaattgtcttgtttcattttcctttgttgattttgataattcccacattttggaaatcgataatttaacttcttcagtacttaattttagtttatcttcctttggagtgaaaatagtggattttggtttgtttgaacatattaaaatttgttcccaattttcgatttcttcaggttctggaataatcgatattaatacacgttgtaagaatgatataacttcaggtacaactctttcagatattctttcataacgaattattaagtcacataggaaaataccaaagaaaatatctgttttattttgttcaggtttcataaactctaatgattcagctgcaactaataatgctggaatgacaactaaatggaatttatcagatgttgaaaatgtacgtccaattaatgtaagcaaaattgcatcactcttttttgggaattgttcactatcttgtgataataatctttcatgtgcatttttaagatgttctctgaatgaatcgagtaatagactttcatatttttcagtaagattagatatcgtacgtgttaagaaatccattattctaacatatttttcattttcgaaaccttctggtaaatttgataattcaagtaaatattcaaataatacctgagtgaaaacacctaatttttccttattaccttcagcaagttttggttgatatgtttcaaaaattttcttaataacagtaacggtttcctcaaaattgttttcatctatgtgtgatttaaattcctttaatgtttttggacaagttaacttggcctttacagttttaggtttaacaactattttcttattaccaatagtaatgacagtttcaccagaagtagattttggtcttgatgatttaacatcattttcattatctgattcatcagcaggttcaagttcttcatcacttgaattatctggagacccaacagaaaatccattttcttcatctccactaccattccaaaaatcatcacctaaatcatcaccaactgcaccttctgctctaatttcttcatcttcaatatcaccttccattctttcttgtctcttcttttcattttcaagtaatctttcagcttcttccttttctatttcttcagctgtcttggttctatcagttggttttgctcttctatcaagttttgcttcagtgaccttcatttcataatcaatatcgaattttgacttttcaacattatcagcttgtttacctctattaacttcacttatttcatccataacattttcaaactcctcatctaattcaccaactttttcttgattttctagatgtgtctgttgtctttctttcttatatcttttagatttagcaataacttctttcataacttccgcttttgtcttttttcttaatggttgaccattttcatcaactgcagcagattcatcgtcagcgccagcagatcttttcttagaaaaaaaatcatcatcatcaatagtatctctagatggaccattaccggataatgattgacctaaatgtgttaatccaccaaaatcaccatcatcttggaaatcaatattatcatcatcatctaaattatacattgaactcttacttgctttggctaatctttccttagtaaatctttccaacattttctcttcagcagataattgaacattaccttcaccgaatcttctatcgataataccaccagctttaccttttctttgcattctactttcatattctttccttctattttcttcaccaatttgtttattgatacctggtttaccaacagtcaatttcttttccattgcatcagctcttttgtttctagtaactttaacatcaaatggattgaatttttctctgatttctgataatgctctttctttatcatctttacgaagtttatcctgtgcaccttttcttgccttacctttggattttttaccaaaagagttagcagtcaatcctgcattttgaagagactccctaagtttcttaagttgtgcacctcctgccattattcagttgtttgtttgatgattttataccaagttcttacagtgaaatgaaaaaaatattgaataaaataaaattttttttgatgcagtgaaaaatgcgatttttttcaaagtggcacagccttaagtattcgaactgaagtctttaatgatattaatggattgtcttgtggagagtaatattatatatatcgatacagagtaaatgtcatctgctcgaagagtcgtggtaacagggttgggagtggtgtctcctttgggtataggtgcaaaacacgcatggaaacaattgataagtgggaaatctggtcttgtttctacatcttctctgaaaaatgctgatcaatttaaagatataccatccaaggtggttggtaaagttccagttacagaagaaggagaagatacagttccaggaagttttcaaaccatatgaccattttactgcacatgaattacgtcgtttttcaccatttattcaatatgcattagttgcagccgaggaagcattgaaagattcaggtttaaatacagctaatatgtctattgaagaacaatatagaacaggagtttgtattggttcaggtattggatctattgatgatagttatggtaattcagttgcactctcacagggtggatacaggaaactgcaaccattatttgttcccaaactgttaactaatatggcaagtggtaatgtttccattaaatatggatttaaaggtgttaatcattcagttagtactgcatgtgccacaggtgtacattcaattggtgattcatttagatttatacgtgatgattatgcagatgttatagtttgtggtgcatctgaggcagcagttcacccattagcattaggtggatttgcccgtgcaaaaagtgttacaactaaatatgaaaatgaaccatggaaagcatcaagacctttcgataaggatagatcaggatttgtactcggtgaaggatgtggtattttaattttagaagaattagaacatgcgttagctagaaatgctaaaatttatgcagagattaaaggatatggattatcaggtgattcaaatcatataactacaccaagtaaagatggtgatggtgcaaaacgtgcaatggaaatggcattgaaaaatggtaatgtcaaacctgaaaatattaattatattaatgcacatgcaacatcaactccactaggtgatagagcagaaaactatgcaattaaacgtatatttggtgatttgaaggattcaaatttgagagttagttcaaataaaggtcaaatgggtcatttactaggtgcagcaggtgcagttgaaagtattttcactattctggcaattaataataatattgcaccaccaacaatgaattgtgataatcccggtatgcatgctgaagataatactgaagaggattttattttcgattatgtttctaatcaatcacaaaaaattgaaattaatcatgcactttcaaatagttttggatttggtggtacaaatgcatctttatgtatttctaaatttgttaaataaataatgatttgtaatgacgtcttgtgaataatagttttaatatatgaatggaaaaatacgtttttgaaacttaatttcatcctgtgatttatggaaatgaaatgattcatttgcagaaattgataagttaacagctacccagactacaaccaatgaaaacgatattgatggtttgataaggaagatggaaccatatattattatttcatcaagataatgtggacatacaacatattgaaacaatccaattcttggtatggtatattttttttgctttgataatattttatggttaaaagattgatccaaagacgcaattgtaaatattattataggaacaatcattccccaaacggaaacatcatttgacatatcaagcaaatacataaccaaaggaatcatattaatagtagtatagaaataaacaccaaccaagtaatggaatatatgaatatttgaagtctttgaaaacttggaaacaaagagacattcaaacaatcttcttgaactttgaatcaaatttatgatgctaatgacttgtaaatccgtaaaagcaaatcgatgtcccagtatcaaacaaacattgactaaagataatgtaaaatgaatgatataaaagtgagtaaaccagcatttaggaacgtaaacgtttaaaaatggtagtttatcgtgtttcagctttagtgttttaccatattttaagaatgattgcagaggaggaaacaatgaagtcaataccaccgatacagatgctagaagtagagataaattaagagtcgataaagcccattgcaactgcagagtagtgaataccatcctttgtcttaagtaaattatataataatcagacttcttctcttagtgaagcaactcgtccaaaacgaaatttccatttttcatgtctttcattaattaattaactattttcgatttttgtaatcactgtttctttcttttgtgactcgtattattattatattattcttgtatctataaacatctaacaatggccgtacctattgtgtttttatactatggtcttatgatcatggtatccatttttctgtacaactatgttgacgaacaattgttaatcgaaggaaaaaataaattagttgaaactatcagtgatgaaaactcattattcaaggaacaagctactaaattaaaggaaatggtttatccatatattcaagaatacatcgaaactccagtttctcacatgttaaatgaaatcaatcataaagacgtcgttccagaagtttcccattatgctattactatcaaagcactatcttatttcaaaaagtttttagctactgaaactggtaagagaatcacttttatttacaataaattagctgcatttatctcccaaattttaactgattatccacaaatttcagagggtgctactttcttatggaacaatcttcataataatgctgaagtagtctatggtcatatctccactgcatttgtttatatcactgaaactgaaccaattaagagtttaatttctgaatatgctaagattcacgataagtatgtcactccatacatcaacgaatcaagtgaaattgtcccagatttgtttcacaaatacttagacaaggtctgtcaaattattttcaatgacaatagtaatgatactaaatacacattcttagttttagttgttggtgttttcttcttcaaatttttccttactaaattattaagaatttttgcaaaagatgcattccaaatgaacaagaatgtctctgatatgtacaaacaagttcaattagatgaattaaccaatcaaactggtcaacacagtgatgtctatttagatgttaaaaaatacagtgttagtgatttagttgttgatgaactcgatccagcgagcaatcgcacaattggagaacaatcagggagcaatcgcacaagagaagaagactcagggagcaatcgcaacaccatcatccaacaagaaatcaaaagggaagaagaacaacaacaacaaccgcaagtaattgatactcctccaagaaatatcaataaaggtgttgctaataacactttaactgcagattctattaaaataaatagttcacccacttcatctaccatttctgtcaaatcgacaacttctacaaaatctacacgtctggtgtttataccaggtaaggatacgatcgagtcaatcgatgaagaagctatccttaaaactgaaatattaacatcatctcctactactactatctccatgtaattttatattaataattattaacaacttacttatacacttttactcactgataagataagaatacgtcgatgacattaatgtgacaaaaaaataattttcgttttctgcctttccctttgctcttcgtacctttttatgattcttttaagagatgatcttttgttttgtatttcttctttctattttaataaactattcatctaatactaaagtctttgcaatgtctaaacaagaatactaccaacaacaacctcaacaacaatatcaacaagaatttcctcctcaacaacaatataaccaaaatcgttcctcaagaagttgtggtggggctggttctaattgtctaggtagattctgggattcaatcattttcggtgctggtgcatcaattggtaatagaatcattggagcaatctgctcttaggtgcctttaaatttaaaagctatgtcgaatttacaaaaaaaaatatattgttaaaattaatcaaatgtgtctgtactacaagtgtaattttcgtattgctttttcaactttataaatgatatattaatatataataaaatagttctcaacatgaatgatatcttatgtgaagaaacgaccataaactttccagattctgtcaatagtatgtaactttaattcagagtattcacgtacattgtgcaaatcattaacgtctttaatgaaatctttcaaaatatattgtggcataatttgactagccaagttcttgatattcttgatttgaataaaaattaaaccttgattgtaaacttcaagtgtattatcaacatcatcagtgttaacatcaatttcattactctttttcttattatttttgatatcccaagatgttattattttttcaacagcacctaaacttctacataatctcaccccaatatcaaatgatttttgctttttatccttattttcattatcaccattataccaactcatgaatgaatttttcaaattccataaaatgaataaacttggtgaggcagcaacaaatccgaaaactaattcttgacttttaagtattttatcaacaccatttaatgctaatgcaccatcaacttttgtcttttgaatttgaattaaaatatttcttagcatttcacctgtaagagctgatttaattggagttttcatttcagcttcataatcattcataataattgtcaaatcaccagattttattaaattagcaaattcttcaatatctttaatatcaccatgatgaacatcctttgcataatcaattaccatcctttcaagtgattttaaatctgaagcaagtgactgttgtgacattagagcaatttcagaattattatcatgtctaatagttttcaatatattatttattggattaattatccaattattccagaatgaaatagttgtatcaataacataatcacctaatcttctgaaatattgaaatgtttcccttctaacattttcatcgtacatgaatgatctaacatttcttacagtggatggaagatatgataatgctaataaagataaaggtaaaataactggccaatttctagttaaatatgatggtggtttattttctttgattttttcagatattatcttttcaaattctgggagtacgttcttaattatattttgtaattcttttctttgagctggtactgaatcatccttcgcacattcatcaggtaatttgaatgtttcagcttccttgaataatgttggaatattataaacaatataattttcagcatgaaagcgattttgatttttaaaacttactggaggatttaataacaaataacctagcctggtgatgttttgcttccttatcttattcaatgctcttcttttcttttctagatcgtacttagcataacgataaggtaaattaatagttgagttccaaaaagtgtttagcattgatttggaggttcttcttttctcaagtaaaaatgaagttggtgatgcaaagaattcttcagttgctttgttcaataatgttatgccaactttgataaattgtgaaatatttaaatatgcatcaattgtaaatgatggcaaccattgtggaatatctttaactgtgagactatttttcattgtaccaacatccttcacgttaataacttttttaataaattggaatacattaacgggtaaggtttgtaaaaaatacatcataattctataatctttacttaatgtaacatcatagtaattaatagcatccattatttgaatagtagaatctgtaagacttttacttgttcttaataggacaattgatgttatatatgataaagttattgttttcaaatcatttgcatcttgagtgtgtgatgtagattccaatgtagctagtcctgttcagacattgattaagttcattgaaattttcattagattttgaattatctacttgatcatccaaatctaaatcattattctccttagacttgtattgttgtgcaatatcatacactttggcaaatatatcaattaattcatcgtgtttttctcctctggattgttcattattgtaagatactaagatattgtcaatttcctccttaacatcaacaccttcctgagccaatgagaaagtctctaatgttaataaagacatgaactatagatcaatctaacccactctgtacttccagaacagtatagatataccttgttatccaatctacaagaaacaatataaattctagtaattagtcctgtactgagaaagctattaattttttgatttatttatcacagtgtgagatccgttttttgatgattaaatcgcatgcctctgctgataatgttgcttctacttttgttctttcttttgcacttcttatttgctctctctgtacaagatcactctctcatctcatagagtttatcttgtagttactaggaaaagtgacaaattacatttctttgcatttatcccccatttttaatagactattcaagaaagacattgcaaatacttatattgccgataattgggatcgagatatagaattacaatcattacattcatcttcaagtacagaatctaatacaaatactaataataaaaataaacataaaaagatgaaattctcacattcacttcaattcaactcagttccagaatggtcatctaaatacatcaattacccatatttgaaaaaggtggcgtataatctacaaagacaatatgttaaagaattgaattctaaaaactatacaggtgaaattgaatttactgtggatcctaatgataaagaaaatccactggttgtctttagaggtgctttggataaggaagcaaataaaatcgataaattttatcaacaacaagaagaggaaattttaaaagaatatgaatcattattcaaagaatttctggaatttgaaattgattttccatttgataaagatgatagagattcaagagagacattaagaaatatcttaaagaatttaatgccaaattatgaatcttatatgcttgaatactcacatgaccattataatgataatggtgatcatcactgatgaagaaaataatattgataatattgatggctctgtcaatcaatacaataataatttaataccaaatatgataagctcccctgctcaaaattcagaaatggcttcactggatgatattgattctttaaaattgcaaaagaaaaaatctttcccaactctattttatgacgatgattttcatgttactttcttagaagctttgaaagcagaaaagaaaccttttgttattaaggttttcactcatctgtccgaattaaaatcatatattgagttgaatagaattggttttgcaaaggcattgaaaaagtttgataaagttttacaaactaatttaaaggatgaatacttacatgaattagatgaaaacagaaatgttttccaatcttcaactttagaaaaactgaataataatattgctaatatcattaagttatactcgatatttactcataatagtatcaatgaatctacattagaattaagtactaatttacgtgaaaaagttgtctttgagagaaacacagtttggagagatatgattggtatggaaagaaagtctcaagctgcatatgctaaaccagattcagctgctcttttaatgaagaaggaaccactgataattaaattgggtgcaacaagagaaattattataccaaactttttattttcttcgtcattatggaaaattattttcattacaataatcacattaacattactcaaatggtcaccatttgaagatcttcaacaaaagaactgttttgctgtattaatttgttcttcattactatgggcatctgaagcaattccattattcacaacatcattattattaccatttttgattgtcttattgaaagttcttaaaggcactgatacaaatgaaatattaaccgcaagtgatgcatctaaatttatttgttctgctatgtggtcaccaatcattttacttttattaggtggtttcaccttagcagctgcattatcaaaacataatcttgataaatatgcatgtacgtttttactttcaaaagttaaacaagaacctgcacctatattattctcaattatggttgtctcaacaattgttgcagcttttgtctctaatgttgcagcacccgttttaatgtattctgtcgtccaaccaattttaaacacgttaaatgatacaacagttaatggtaaaacagttaagaatcaatttgcacaagcattagttttaggtattgcattagcatcttcagttgcaggtatggcatcaccaattgcatcaccacaaaatgttgtcgctttacaatttatggatcctgaacctaattggttacagtggtttgcagtttctgttcctgtttgtatttgttgtttggtaatcatctttattattttattattttcattctcatttaaagatattacaattgtaccaattaatcaacattcagataattttacaattaaacaatatgttgttattctaatttcaatcacaacaattgttttatggtgtcttgcatcagttttagaaccttggtttggtgatatgggtcaaattgcattattatcaatggttacattctatgttacaggctcattatcacaagaagattttaataattatccgtggacaattgttattcttgcaatgggtggtatggctttaggtaaagcagtttcagtttctggtttattagcaacaattgcaaaacttattcaagttcaacttgaagaatctgaattatttacaattttatcagttttcggattgatcgtgttaattatggcaacttttgtctctcatacagttgcagcattgattattatcccattagttgctgaaattggtaaagcattaccagatccacatccaaatattttagttttctgtactgcacttatctgttcatgtgcaatgggtttacctacatctgggttccctaatgttacagcaattggattaactaataacgttggtgaaaaatatttaaatgtcggtacattcatcaagatcggtgtccctgcgagtatcggttgtggacttgttgttattacagttggttacttatgtttaagattaattggtatgtgatttgaaggatatatagattataatcaatacagtttttttttcagttataaagcgtttttattttgttttttcttagaattaattggttccatagtaaatattatcgataaatctatgacacatccaccaatcattatccgaatcggtgctaccctgaccaccaacacaggcagtaacaattttaatttttggaaatgcatggaaaattctctttatagctaattcagtagttgtataattaactaaaataatattattttcgtcaacattatgatctaataaaattttaattgccattattgatgctgctcccgatattgtctgtgcatcgaaaagaagtacttgtgagttcttagttattattggtaatttttcagtgtgtaattgaggttcaccagttcttgaatctgtttgaattaaaagtttaccaattttagcagctggtatagttcttcttaaggattttataaaacaatcaccggatcttatgattgaaactgcaattatttcattcaattggaaaaatgcatctgttggattaattttaacatttataggtgtttcaatggttttacctatagaatctcctgaaacatatctgacaaaatttaatgattcattaatcaaaattgatgcaattctatcaaaataaaatgagaaaatatcattcttagtttctttattaagtaatattgttttaataactttaacttgattggtttcctcaattattgtaacattatcccaattgattggattaattttcaatcccaacatttttaaatgattaatatgttcagttgatttaatctttaattgattctttaaatgttcaataagtaattctaaagctatatagttatccgatccacgtggaataactatatctgcatttgatcttgttggtaagacatataaaatagcgttagggtttaacgaatgcatcccattgttcgataacacttttgatatctctacctctatgaacaatatctcttaataacctacgagaataacaaatatcaatatcagtatcaacgaaaaccttacaatccattaaatctaacaattcctttttgaataatgtaaaaataccttcaattataataacatttgcaccatatattgtaattgattgatcttttattcgttgatggttactaaatgaatacattggtatttctgtctttttcccatttttaattgatttaacacattcataaatgagatctaaatcaattgcatctggatgatcaaaatcatattcattattgaatgcctttgcactcaattcaggtgtaagttctttataaaaattatcaagtgatagtaaaattgtccatggttcgttaattgattttataatctcttgtgcaactgttgttttacctgatccactcaatcccgctattccaataatataaggtgatgaccatggtggtatgtattcagacatgtgaagaatggattgtttaaagatagattgaggactgtcatcaggagtcttatcgatattaaagcattgccatcatgtgtcatgtagggtggctgtaaaatataaagatgcggcgcagcttacaaagaattaatacattaagcacaacttgaatgtttcttttttatccaaataagttgtaaccattgatgggcgaaatccgtcaacaaccctgatgattggacagagacgcagcttaaacgtgctcgtgtgaaaaaagttgatgttgatgaagaaaaggatgatgaaatgtatacttttgatggtggagaccatattgagtttggtgaagatgaaaaattagttgaaatgactgaaatcagtgaactaatagatatagctgaacaaaaagagttcgatttgattgatacgaaacaaaaattaccaatttatcaagaaagaacccgggttatggaaatgatcaaggaaaatcaagttattatcttagttggtgaaacaggttcaggtaaaactacacaattaccacaatatatagttgaagatggatatggacgagtttgttgtacacaaccacgtcgagtggcagcaatgagtgttgctgcgcgtgttgcagatgagatgggtacgaaagttggtgataaggttggttacagtgttagatttgatgaacgaagtagtaagagaacagttttaaaatattcaactgatggtatgttagttagagaaatgatgggagatttaaatttaagtaaatatggtgttataatggttgatgaagcacatgaaagaactattcatactgatattttacttggattgttaaaggaattaatatctaaacgtaaagatttgaaaattgttatatcatctgcaacattagatgctgaaaagtttagcttatttttcaataatgcaccaattgtcactgtgaagggtcgtagatttcctgttgatatttattatactatacatcccgaggctagttatttaaaggctgcaatcgctagtgtgttacagattcatggtagtggtgctaagggtgatattttagtttttttaacaggacaggaagaaatagaattattttgtgaagcattatctgaaatcgatactcttgatgtattgccattatatgcaagtcttcaacctgatcagcaaaaattagtgtttgagaaaacaaacaaccgtaaagttgttgcatcaactaatatagctgaaacatcattaacaattgacggtattgttttcgttattgatagtggtatggttaaacaaaagaaatatgatccatcgaatgatagtgatagtttagttgttgcatcatgttctaaggcatcagcagatcaaagagctggtagagctggtagagttcaaccaggtaaatgttttagattatacactaaggaatcatacaatgagatggcagtttcaccaacacctgaaattttaagatctgaattaacaagtattgttttatcacttttatcaatgaatattacaaatattatgacattcccattcatggatcgaccatcagctaaaggtcttgcccgttcattatcactactttatgcactgggtgcactcaatagtaagggacaattaacaactattggaattaagttatctgcattaccattaaccccaatgataggaagaactattttagctgcatccgaaaacggtgtagtcgatgaagttattgcaattgtctctcttttcgatgaatccccctttataaaccccaagaaagatactactaataaaactgctgctaaggctgcacaacgtcaatttgctaatacttataaagctgggggtgacccattagcattactagcattatgggaaggatacaatgcaagtggatactccaatcaatggtgccatgatcattgggttgatgctagatcaatgagacgtgcaagagatgttaggaaacaattacagagaatatgtcgtactatgggtctttattatggtacgattaatggtgatgtagtccgaaatggtgaaaaatcatctcacatgaatattaatgataagactatatcgattatgaagagtctctgtcgaggtcttttcccccataagggagtattatcagatataaccacttgcacatactctacagcagcaggaccagctacactacacccatcatcagtgctacagggtacagatacagagaacaccccgttgaaaccaccacggacagtagtgttccaacatgtgatccgaacttcgcgaaattttatttacaacgtgatgcctgtcatggagtcctggattgatattagagagtttaaataaatataactgaatgtttgtttcttttgtagaagtttgtttcttttctgatatattgtgtattctgctttatataactaaataaaaatggttctattttatgcgcctaataaagaattatatgaacttacaaagaagttttacaaatcattgtttttccaaagctatgaagaaacaaatgatcaatgtattttatcaaacaataaaacttcaatttcattattaattgatccagagaattcagcttcaattgaagaaattaagactaatactgaaaatttaattaaacatattaataaaagagattggagaacttatcaaagcgcaattacatttaatgttgaaaatttaaaggaaattgaatcaattttaactgctaataatgttcaatttcaacaaaaaccactgaataatccattggaagtttatgcaatcgatccattgggttcaattattggtttctctaaattagcaaacccatttgctgtaaaggaaagaaagcatcattcacattcacatacagaatctcataacctttcaatcggttcatcaattgcaactgcaaataatactaatactgcaactaatgatgttcaacaatgtattgcagtcatgacatccggtggtgatgctcccggtatgaatgctaatgtccgtgcaattattcgtactgcaattcataaaaattgtaaagcttacgtcattcatgaaggttattcgggtttagttaatggtggtgattttataaaggaaattcattggtctgatgttaatggatggttatctgatggtggtactaatatcggtactgcaagatgtatggaatttaaggaaagagaaggtagattaactgcatgtcataatatgattaatgcaggtataactgcattaattgtttgtggtggtgatggttcattaactggtgctgatttatttagagctgaatggccttctttaattaaagaattattagacactggtaaaattactcaagatcaatttgataaacatcaatttttaaatatttgtggtacagttggctcaattgataatgatatgtcctcaactgatgttacaattggttcttattcttcacttgatagaatttgtaaagcaattgattatattgatgcaactgctaattctcatcaacgtgcctttgttattgaagttatgggtagacattgcggttggttagcattaatggctggtattgcaacaagtgctgattatattttcattcctgaatctccaagtaaacaaagtgaatggagtgaacatatgtgtaaagttatttccaaacacagagagagaggtaagagaaagacaatcgttattgttgctgaaggtgcaattgattctagtttaaatccaattagttgtaatgatgttaaggatattttagttgaaaaattaggtttagatacaagagttacaactttaggtcatgttcaacgtggtggacctgcagttgcatttgatagatatttagctacaatgcaaggtgtttatgcagttgatgcagttttaaatggtaatccagacacaccatctccaatgattggtatttctgaaaataaaattatcaagagaaacttagttgatgcagttaaattaacaaaatctgttgccgaagcaattaatgcaaaagattttgttaaagttatggaattaagagatactgaatttagtgaacatctgaaatattttaaagcaattaatagtgcagatttcaaagatccttcattatcaagtgaaaatcataaaaattttgcaattataaatgtgggagcaccagctggtggtatgaattctgcaacttatgcatttgcaaattattgtttatcaagaggtcatacaccttatgcaatttataatggattttctggattatcaagacatgaatcaattagatcacttgactggttagaaattgaaaattggaattcattaggtggatctgaaattggtacaaatagggatactccattagagacagatattggattaatttcatattatttaactaaatataaaattgatggtttattaattgttggtggttttgaagcattagaatcattacatcaattagaaaattctagatcaagttatccaggattaagaattccaatggttttaattcctgcaacaatttctaataatgttccaggtactgaatattcattaggttcagatacatgtttaaatcaattagttgaatattgtgatataattagtcaaagtgcaagtgcaactagaaatagatgttttgttgttgaagttcaaggtggtaattgtggttatattgcaacatatgcacaactatgtgcaggtgcagaatgttcatatgtgcctgaagaaggtattgatttaaaacaattgaatttagatattcaaacattaaagattaatttccataatgataatggtagaaataaatcaggtagaattttaattaaatcagaattagcaagtaaagcgttaacaactgatgttattggagatataattagttctgaatctaatggtagatttgattcaagaactgcaattccaggtcatgttcaacaaggtggtattccatcaccaattgatagaactagagcaacaagattagcaattaaggcaattgaatttatggaatctaattttgataatatttctaaagctgaaaatgaaattggtgaatttattagatcaccagaagctgattcaacagctgcagttttaggtattcaaaagaacaatgttttatttacaccagtttctaaaatttgggatcatgaaactcataaagaaggtagaatgagaaagattatattctgggatgaagtaagggaagttgcagatatgttagttggtagagttaaggtttgatatttatttacttttctttgaatacccgtacatttataattttaataaatttatataattaattaatgaaacaaaacaaaaaaataaaaaaaataaaaaaataaaaaaaataaaaaaacgaaaagaaatgctaattattcatcaatacatcccaatcacgttctaaaacctgtggtaatgtagtcgtaaacatttcatttaaatctgatttcaaatttgtatcatttaaggggaaatagagtatttcgtcaacttgatttattttgacaattaatttcccattaagttttaatttaagtatttcatcaataattaaatttttttcatcattaattgatatatccaagagttcaaacaatttatcaaatcttatagttttgtaaacgttagagatataaattatattcagttgaatgatatttaatttaaccgtacttagctcatcttcactaaaggatactagctttatcgcttcatttcgtattttatcataatcaaggagtgtatcatcacatagtaagttgagaagttcaaattgatgagaatcaatgaatgttttgattattgattttttgaaatatccataaggttccaaaaggaacgattttataaaaaaagcataaattttttgatcaatcagtaaatttttatgaccagtattgaataattcaaatattaaatttaagtacaatgaattattattttcaaatttcaaatactctaataataataattgtaaattgaatttcaaataatttagtactttaaaataagttgtagatttagataattcattaatttcaatatttactttgtttatccaattttcaatatttatcctctctcgtatagtactattgatgaaatgattatttttaacattttcacatttgaaaaggagtattagtaagtttatatccactctgtctttccatgatggtatctttgttatatctatattcttattgatcaatgaataatcattattgttgtatatttgaagcaatgtactcaatattttatcatctttaacaagtgaatttatttcattatagttaatgaatttgcaaatatgtaatataacgattataagtgaatcattagagtttttactgtaatcgatggttatttccttattaactttgtcgtatactttgtcgtattcatcagcggtatccattatacctatatatgaagtaagaaagttatcataaaaacagtgatacggaagtggtaaaacgaataatactcgtatacaataactcgtatagctcgttccgcaatattttcatttccatttttttttcaaaattcgaaatgtttgctaatatattatcaacaatactattctttttctttattttattttaatgtgtttcagttgttctatcttattcaacaaccaagtatcaaaaaactaatataagatgttatgttgtagtaagaaatgttccttgatgtcaattcttaaagtagttggattactttatatgattttctatgtaatggatactttattttatacatggttaccaaagaattatgttttcgataaggatgaattacaaattattgttaaggaaacattagcaactacatcaaatgatgatgcatatccattctttgaagcattacaagaaaaattggaagaaaaatatggtagtgaaattattaataaagttaataaggaagattgggttttcaataatgcaggtggagcaatgggtcaaatgattattttacatgcatcaatttctgaatatttaattattttcggatcatcagttggtacagagggacattcaggtattcattttgctgatgattattttacaattttaaaaggtcaacaatgggcatcatttgcaaatcaatttgaaaaatctgtttatttaccaggtgatgttcatcatttagctaagggtaatattaaacaatattcaatgccaggtggatcatttgcattagaattagcacaaggttggattccagctatgttaccatttggatttttagatacattttcatcaacattagatttccataatttagcaaagacagtttatttaactggtaaggatatgattaaaaacttgataaatggtaagttctagtggatataatattatataaaatattatataaaatatataatgttacattaaaattaaaatagaaatacaatacttccctgcataaacaacactgattaaatttaagacccacaattgtagttcaccgatcttaattcaggttccggtgattgaaattttcattttcttttttaatctgcaactgggcttattttatttattttcatttattgtcattctttgtcattttttattgtctctttttgccttttcctttctttttctgtagattatcagtgattgttattgacatatcgatatatcacatttttaccttccaatttgcttacagcttttggaaactattattcacttttcactattctagttataattctagttctacaataatgactcgacatggtggtactaagaagaggaaaaattctttaaacaatgatatcccacattcaactgaaatgaataaatcaatttcatattcttcaaattcaaattcttcaattttaaattcaaattcttcacagagtaacaataataaatcaatacattcttcaccatctaataaacgacataaaccttcaatacagagtaatagcagtaataacaatattcacagtcatactcatagccatcaatcaacaaattcaaaatcttcttcaataataataatagagaatgatataaatgatataaataatataaataataaacctctactatctgatgagttattcttttcaacttgggttaaatgtggtaatttagcattatcattgaattcaaattcacctactgcaattaaatgtttccagatggcattaaattatttcccaatgaataattctataatgaatttattggttgaattattaatacaaaatgatttaattaaacaaaattacattggtattcaaaatacaattaattttatcataaaatcaattaataagtacccaaatttgaaaaatgattttgaattaaatacaaaattagctgattattatctactcataaatgaacttgaaaaatctcatgaaattataattagtttaatggaaacttgatcaaaataatcctaaatgtatggctaatattaggtaaatgtttgaaaaaaatgaatttacaaagagattcaattaatgcttttacaaattcattatatttattaccaaaaaatttaaataatttaaattttattaaaattgcaagaaatattcatttagaattagttcaattagcaattgatgatggagatttagaatctgctagaaatgaattaggttcagttttatcattaccaaaaccaaatgatgatttaacaattaatttaataactaatttatcaattcatttaatagtttcatttaaaaaatcaggtaattatttaaatgcaatttggatttgtgaaatttttcaatcacttttcccagataatcaaacaattttattatttcattcatatttcctattattagttgatcattcattctttaatccaggcttagctataaattttttacataaatcttatcataatgatccttattatactaaatcaaatgaattttttcgaatatattaatgcatcagttggtgattttttaccttttttattattatcttatgcttattattatactgataactttacattatcatttgatagtttaacagtttcaagtagaaaattaattaatccaagttacttaccaattatcaaaaatttatcaaaacagttatatgataaatgtccaaatgaatcattctcgaaaaacttaaatgattttattaaagctttagatgatgaaaaggatggaattgaaaatagtaataataataataataataataataatgaggattataataatgatgatgatatcaagaagaataaaagaaatatcaaaaaagatattgatagcaggaaaaatagtaatgataatgataatgaaacaaaaaatgaattcccattgcatagtttgaatgatccaattataattgatttgattatgatgaatactgatgaaagagtttatcagtttaataatattgattttaaaagtaatataaacaataatattataccatttagaaagaatataacacttgatagtttaataaatgatgtaaaggaattaccacttcaaggtttgaatatggatgaatcaaaaagagagaaatttaataaattataccccgttatcaaattaccatcaagtttgccaattaatatgtatataagagataataatgataatgataagtgataagaataataatgttgatgataatactaaattcccaataactagattaccaacaccagtttcaaacccaagaattaatactgatgttgttacaactgcttttaaatcacccaaagtacagaaaagtccaaataataataaaataccatcaccaagacctaaatcaactgaaaataatagaatgtcatttaatatgaccccacatcaatcaccacatgttaaaaacattactgttaataaaaacaataataataataacaataatcatagtaaataatattaatactagtaataacaattcaccacgtaccaggcaaaatttacaaggacagaataatccaatgtattatccagggcaattacatgggcaattacaaccaccacagggtcaaatgcaacaactacaaggtccggtacaaatacaaggaccaccgccgcctcagtatatgaattattcacagcaacaacaacaacaacctccacagatgatggggcatatagtacaaatgacaccaatgaatcatatgcaaatgggacaaataccaatgcaaatgggaccaatgaatcatatgcaaatgccaatgcaaatgcctatgccaatgaatcaaataccaatacaaatgaaccctacacaaataaatcaaatgtcaatgcaaatgaatcctacacaaataaatcaaataccaattcaaatgggtatgcatataccaatgaatatgggaccaatgagttcaattccaatgcaacctaatatgatcaattcaatgggtaaaaatatggaaattaataatggaaatgatagaaatattgaatatgtaccatttacaggatattacaattaatttagtagttaattaattaatgtttaaaaaaatgaaacatttgtataattaaggttaataaatttattactataaattataattattcaaaaccttaaacggtttaaaacgtaaactctaaaattgagcaatccaggtgcatattgaggactcaatagataacaccaccaattaaacttatcacaataaatcgcaatgaataataacaagagggaggggttacaaattttattcgaggatattcaatgaaacgaaactgttattcattttcatgtaatatttttaactaaacaattttgtattaacttgccatcaattttgtcaagaaatttttttcgataatattatggacactatatcgataatatcttaaagatcggtctccgtatccttgtagcaatgttacaaaactacttttctttaattgttacggagttttaactgtttcaagttttcaaaacgtgttgtctgattacaatgagtaatggtgtcgtcattagtattaggataataaattggggggattgttttcatatatagtatcgtttcttttttttttctctattagaatcggcaatacaagctggattaaattttagtttccaaatgggatcttaaaaaaattatttcaaaaaccgaatagacgcaactctcggcatttaaaaatataatattttttgcttagtttaatttctttttgcattaaattaatagttacagtttacgcattctctataaccttctattctctattaatatcattagatatagttctagctccagtatttttattcgaatgaaatgtaacattaatgatgaaattggtaattattgttatttaatttgtcttaagaatgtataaggtttgaattgatttaatgatttatgatacaatagtaactatcaaatcgggatatttttaactcagtaatttcctcataacgaacttaatagacctattcatccatttactacaataggtttgctgaaattgaatttgtctatgggtggtttaatagattttcacctattatttattagaaattttttatcttcaataaaaagacaaatttcacaacattgaagttagcctttaatttcgtagattgcaacgagcagtttcaatcatagcctcttggagtagtcccatgggaataatttataaaatgaaaaataaaggttacatgaattttaaatatctgtttacgtaagcaactatccctacaagctacacttcaaagttttgaaaattattcagcaacaaaaaaaaatacaatttttatcataaagatatacagtattaagtaagattatacctataattataattataattttgaaccatgaacaaaattgaaacctttattaacatcaactttaactttttcaactgcatgttttgtcattaaaacttccttttcagttaaataacctgggaattcaactaatttaataccttcttgatcaattgttattggtaaactaaaatattgagtatgtttagtaatgaaaaatggtaatttaaaagtttctaattcatcaattttaacaaatgcaacttctttaattattttattaaatttaattgcatctaataaattatcaacaaatctatatgcagcagttgccatagataatgttgcactacctttaccatcttttgctttaacaacttcatcaccaccaaattgaactctattaattaatttatcataactttcattatcattaaaatttttattccaagaattaataacaggtacaattgaatcacctgaatgaccaccaattgttaaaacatcattgtataaatcagttgttgaaactttattatttaaggaatctgataaaaattgttctaatcttaaattatctaaagttgtaataccgaaaactttctttggattataaacaccttaattttttcaattcttcaactgcaattggtacagttgaattaacaggatttgaaataatacaaataaatgcatttggacaattaataccaacttgatgaattaatgatttaacaatacctgcattaattttaaataaatcatcccttgtcataccaggttttcttggtatacctgcaggtataataacaatatcactaccttgtaatgcaattttaattgtttcattcatcatttttatcctttggaacataacctttaattaattgtggagttggaatatgtgataaatcagctgaaactccaactgtattaacaatatcatataatgataattcatcaatttttgtattaagtcttaataaaagtgataatggttgaccaattccacctgctgctcctaatatagttgccttgaccattattgattgtctttttacgttaattaattaaaagaagtggttataataaacttaaatcaaattatatgccatcctttccaatataatttaataataattgaaaaataaatttgataaattcaaagactccaagatgactcctccatgttaaaaacaataggaatctccacttactgtttctcacttatcagggaaatttaaccgcacttcctatttcggtaagtctgttgcgtctatataaggcttatcgacgcgacatgcttctttgtgatggttcatagctatttctattttcgtattataacatgattttgaatattcaatttggatttattttattttatttatttatttaagggagtgtttgatgtataatcattatttgtctttatcattaaacaaacaataaatggtatctcgtttggcatttcattcatttaaaagattcaattctacatataaaggtcctgggaaatcttaccttcctccaaagcccaattgataataaaccaactcataaagaactttcaccagctcaaagagcttatttagatagagttataagagttgatcaagcaggtgaattaggtgctgatttaatttatgcaggtcaatatttagcattagtctcataataaaaaagttaaaccaattattaaacatatgtgggaacaagaaattcatcatcgtacaacttttaatgaattagcaaactcaatatcgtattagaccatcaattttaacaccattttggaaaattggtgcctttggtatgggatttgcaactgggatttatgaataaggaagctgcaatggcttgtacagaagctgttgaaacagttattggtaaacattataatcaacaattaagagttttatcaaataattttaaagatatagaaaatataaataatggtcaaaatgatgattcaattgaaattcaacatttaaagggtacaattaaagttttcagagatgaagaattagaacatttagatactgctgtacaaaatgattctaaaaatgcaaggaccttattggcttttaactgaatcaattaaaggtgtttgtaaaactgctgtttatcttgctgaaaggatataatataatattttgttgttgtttttttttataataataatacaatgttttttttatagatattatactttttaatgaatgacttatgacctaaattattactagtgcttttttcccgtttctttaccttttaattatcatcagtactcacattatattatatcattataaatattaacagcatttataacattagatgataaattctttgcatcagagaattcaacaattgaaattttttcaaatgatttattatctaaatttttatgataaccaatccaaattttatcggcttttaattcaggtgttataatttgaattatcgaatttgacaacttttgtaccaatcattttataaactgatttaacaacaattaataaatccatatatgatatataaccatcattatcacgatcatacattttgaaacgcccattttaatttttcttcaattgaacctctggttgcaatacttaatgatttaataaaatctttaaaatcaatactttgtttattatttatattaaatgcttcaaatgcatatgctgcaaattcagttggatcagccaaatggataaaattgtttatgaattttgataaattcttcctttgttaattcaccattattaatatccctcttaaatcctttataccattgatgtaattcacgtgtagaaaatttaggtctcttgtcttaaaatcgttatatcttcattacttaatttacttgtcttttgtcccatattgtccttgaatttaagagaaaaataacaatgcatgatgtgcacctaacctttagattaacacaaatgacaattgttctgtaacattaaatttatccaaaaaagaaaacattacgtaatacggtatagatacacacactatagaaggatattacttacacagattaaaaatataccgataaaaactccatttaaggacagtttcttgtttaccaccgaatgaaattgcacttgcaaacatttgtaatgaaatgaatgttaaaaatcctgatgtaattgataacaatattgcaattaataaaatactaaatggatcatccatatcaattttatcatgaaacatataataaccaatcaatgcaccaaatggttgacttaaacaacctaatgaacctgcaattaataatgctttaaatcttgaatttaatgcaacatataatggtaatgtcattgtaaaaccttcaacaaaattatgtataaacattgaaaggaaaattgacatacctaattctggattcgtctttgatgttgaatacattataaatccctctgggaatttatgtaaatgtgattgctaaaattgtttgtaaaccaattgataataatcttgataatggagttttaatatgatgatgatgttcttgtaaattatctgtttcagtgagtactaattgatacaaaatcatcatttccataatcagtgtcgtgatcagtcttgattgtgtgaatgattatcaatttgatcatgatattggctgtgaattattatgactatgattaatggatttcattgataaatttgatagttgatgatcatttttagttgaataatagtctgtgatattcatattattattattattactatttggaattaatggtgaatggatatctaaatttgggtatcttgaagagaattcatttttatcaattatcatatgttttttatttgggaaaaataataaattttcttcagttggtcttgaacaaaaatataattcatttgatttatgtttatgtaatttattttgatttataatattatcagtacaacaatcaatatcaccaaaacatttacctgtcattttttcacctttgagagttttcaaagacagatcaattaatgacagtgatttctttggttgattaattggattatttgaatgcatttgagtataattaatatggggttgggtatgaatttcatgttttgattgaggtgggggtatcttaggtttcatcaataatagtattattatgtatttgatgattatgatctggtggagaatttgaagctgaatcaggttacatggtatgatgtattattaactgatctatcttgacttttatttgaagaatcggaacctgtaactgatgaatattcatttgaatgatcaagtaagttgttattggaatgtgaattggaatgtgataaagatctagtagtagaattatcattatcattatatgactatgtccatgatcatgactctcatcatgaccatgatcaccatcatgagcacaatgaactaaactttcattagttaatagatgaataatcaaattaagtaatgaacataatacaataccaccaatatagccagaatattcaactaatttaagtaattgattatttgaatgtaattgaggtaataattttaaataagaatgagatcttggtaataatttgtataatgaagtaaataatagacaaccagatgataatgataatgaacatattaagaaatttgtatcatttgcaatatggaaaggtttcctttcagctcttttggggaataataaaatataaattgaatccgtatatataacacaacatccgagaaatgtaatgattgaagtaagtagtaccaatgcccagccttgatccattgcggttataacaattctaatagcgggttaaagaacgataaagtgttatataaatataatataatgatgaacgataatggtagcaaagtaataaagtggtgattaattgagtgaataaggcatgtataaaggttaatattatcagataaagaagtaaagtactttaacggtcactagcaaggtgaaaattattttttttcttaataaagagattcatgatcatcagattcaccatcatcatactttgtaatttgggaggctgaataaggtattattacgttaaagtattacagtatattatataaatacaacacaaatcagaaaccaagaagttctactaagaccttgctgacttttctctgcaaaagctttgcttcagttgtccctatctagataattcatcatttatgtgttgtattagagaagtttagaaattagattaaatttagtaatagtaataataatagttatagtagtaattacgtatactccatatacctctattgaagtagtgaattcaacagaacccatcgacttgtcaaatagagcacaaatcttacagagatggaatcaacccctaggggaaataagcttagtatttatagtggtgaaattgcatgttggagcgaatttaccactcagtgagggtttcttaaaaggttttggaggctctgtacatgcatttatttatgatttaattatttgcctttagtagattggctctttcttttgagtgtatattcattaattagctgtatttatgacagttatcggttggaatgtgtagtatatggcccttttacttatatatcactctatcaattatctaaatgggcttttatattggattttctcactacttgtattagacttgtccattgatattgcctaattaggcaatattacactttgtaatgattcatatcactttaatcaaatgtttttaatttcttttgctatgtttcatattcattaaccatattttgatctaaaattttattttaagtatatagagatatgaacatgtttgttatcagttttcaatgttttaaattggtttctaatttattatttcatattatactatattatttccatcattaaacagagtacagtcaaatgtccaaagataaagaatttgataatgtttttgaatcaactgaatcagttattaatacaccaacttctgtgtatgaatttgataaatcaaaaattaatcaatctatgaaagaaaattcaactagttgaaaatgaaaatgaaaatgaaaatgaaatgataaaggatgataaaactacaaactactgatgatgaagacttggtaactaaaaacccattccatttctttataaaaaaagatttcattttactcattcctgctcttatcactaacgcattatgttcagttactgatgttgcttccacaattatgattaataaattattcaaatatttaacagacttacaaataggtaaatatacaaattcaaatgattttatgcatgatatcaaatggccttgttttggcataattttaattggtttaggtacaactttatttggttggatggaaacatcacttttcacttatcttggtgaacgtcaacaaattagatgtagagaaaaattatatgaatctttattatctagaaatttaagttggtttgaaaataattctaacttagatggtgatttaattcaattaaatagatcaatagaagaatttagaagttcaattagtgaatatttatcaatattatttaagagtgtcttctcaatcatctcattaataattatttcaatattttattcttggaaattaactttactgttcatgtcagttattccaatcatttttttaacaattgtcatcttcggtaataaaattgaaagatggtcagaggaagaagataaacaaagttcaaatgctatttcaactttagattggaatttcacttctttcatttggattaaaataatttattcaaaagatttagaattacataaatttaatgatttattagataaatgtgaatttgcatttagaaatttctctatttatgcaaatattatttcttcagttatgaaaactttagctttattattgtttgttcaaagtttttggtttggttcttatcttattagaacaaatcaaggtcaaccaagtgatattatttcatcattttattcatgtcttaagctagcaatgacaattagtcatttatcggttattgcagttattttccaaaaggcaaatacatctttcaaaaaagttgtcaaatttttattatctgatgaagaaattaatgaatttaacaaaactttattaatcccggatgaaaatttgtatggtgatatcaaacttgataatatagtgttcaaatataataccaaaaatactgatgataatgctagtaatctagagaaggaaaatacagattcagatttagattcaacaattttaaaaaatgtttcattacatattgaaccttttagaactacttatttaattggtaaatcagggttctggtaaatcaacaattgcaaatatcttactaaaactatacaatccatcaagtggtttaatttcaattgatggttatgatttacaagaattagatactaaatggttacgttcacagataactttagttcaacaattttctaaaattttcaatgatacaattgcaaataatattttacttggaacaaattatgaaactatttgatacatctgatgttttagatgctgtggaatacttcaatttaactaatgttattgaaaatacaccaaatggatatcaaacaaaacttggtaaaggtaatgcaaatgagaaaaatgttcaatttagtggaggtgaagaacaaagattaaatttaattaaggctaagttaagaaattccagtattttaattttagatgaatctatatcagcattggatattcaacaacgtgaaattttcatggataaaatttataaatggagagaaaataaaactacaattattattacacatgaattatctcatattagaaataatgatatggtattctttattgaacatggtgaaattgttgagaaaggtttgaagaatgatttaattgcaaatggtggtaaatttcaacaacttgaaaatcaaggtgattatgaaagtgaatccaataatatcaaagaaacaaagaaacaaaataggaaatccatttttgaagaaattaaagaaaaagaatcattatcaaaggatgaatactttgatgttttaaatgaaaaagaagaagattcagaacaattaagtaatattagagcacctattttaattgcttataagttattaataagttctttatcaattaaatacaaattattatatctttttggattgtttgttactgtatgtgaaactgttttgacaccagtgttttcattctgttttctcaaattaatcaatggtataattccaaaagatcatggatcattgaattacaaatggtgatcaagtcaaatggtcaatgattgctacagctattgctattcttacgggtttactttcatttatcgcaactactaatttagaatttacatcagctagattgagtaaaaatttacaatcattatcattagttaaaatactcaatcaaaatataccattttttgaacatttgaaatgctaatgaactttcaactttgttaatgaatgactatcagagatttccgtaaagtttattcatcaaatttagcaagattagtatcaggtattacaattagtattgtttgtattatttggacattagttacaggttggaaatatgcattagttggattcagtatgttcccattatttgcaatttttagtttcatcagtactttaatcatgcaaaaggctgaattttcatataaggattcattaaatgatgcagaatctgttatttatgagagtagagttggtatcaaaacaattatgtgtttaaatgttcaagatcattttagagaaaaattcacgatcaagttaaataaagttttgaatgatggattaagaagatcaattgctattggattttcaactaatataatatttatattggttaatattgcacaatctattatgttatattatggatttaaattagttgcagataatgaatatacattaggttcaaatgatgcaaattattatgatgattttaatgtcagtcacatttttgtcagagttaatgtcatcagcccctggtttatataaaggtttaagagttgcattgaaattagatatgctaattttcaaattggatgataatgttggcaataattctggatatttaactccaaatttcaaaaatttacaaacagatgattgtatatcattcaaaaatgtttcattttcttatccatcagatactaacaaactagttttgaaagatttcaatatggatattccaaaaaatcaattaatttcaattgttggagaatctgggtgtggtaaatcaactgtgatgtcattaattttaagactctattcattatctagagaacataaaagttcagaaggacagtatccagaaagtgaagaaattaaaattgatggttatgatattgaaacaatcaaaatgtcacattttatgaacaattttggtgttgttacacagaaacattactttttcaatggtacaatcaaggaaaatttactatacggtaatccaatggcccattccgtatcggatgatgatatttgggatgttttaaataaacttggattaaacgagatggtacaatcattagaaaagcaacttgatgccccattatgtaaatctggtaatgttctcgtttcaggtggtcaagcacagagattatcaattgcaagagcattattacgtccatcaaacattcttttaatggatgaatgtaccgcctcacttgatgcatattcctatgatcgtgtcatccaattattatcagaattgaaacattttaacaagaccatcatctgcattacccatcaagcccaaattatgaaaaaatctgacgtaatctttgttatcgaaaactgcaaaattgccgaatctggtgattatgagaccttgctgggaaatggtggtttcttctataaaatgatcaattcccattcaatcaattgaagcccactttcattttgtactttggtatatttgtaaataatctatttcgtatttctatcaattgttttaaataattgaagctgatcacaatttttgatatggctaaatacattaaagttccaacttttaaattaaacacaggtgcaacaattccagcaattggttttggaacctggagatcaactgaagaagaagcatacaatgcagttatcaccgctttgaaagtcggttatagacacattgataccgcatatatttatggtaatgaacatattgttggtaaagcaattaaagattcaggtgttccacgtgaagaaatctttttaacaaccaaattatgggcaacaggtgcaatgaaatcaaccgaatcattagagaactcagttaaatcattaggtgttgactatgttgatttatatttaatgcattggccagttacaatgaatccaaatggtaatgatgataaattcccttcaaaaccagatggtactcgtgatgttattcctgaaagtgaatggagttatgttgatacttataaatcaatggaaaaattattagaatctggtttaactaaggcgattggtgtttctaattttaccgtttttaaaatgaaaaaaattataaatgaatgtaaaattgttccagctgctttacaaattgaattacatccattattacctcaacaagaattagtcgatttctgtcaaaataatggtattatcgttgaagcttactctccattaggttcgattggtgctccacttttgaaaactgataaattaattaagattgctgaaaagtataatgtttcaactgctgctatttgtatctcatggcaagtatggagaaaagttgttcccttaccaaagagtgttaaccctgaaagaattgaagctaacttgaaaattattgatttagaagatgctgatggtgaagaaatctctaacttatacaggattcacggtgttcaaagatttgttagtccagattggggtgtcgtgatctttgattaaattcaattagattaaattttatatcattatttttaattatttaactttcttatatatatactaatttacttatttaacaattttttagttaaaataaacttttttattcaagtcattataaatgaagaacagcataaggaacgtctggttcttcgccattttcatcctctaaacagacttctaaaatcaagttcttttcatgtgcaggtagtggtttcttagtaactaattcaataatttcagtaatcttcatagaatatcttggttccatctttttaacataaaatgatgcaaataaaagtgaaacaccatatgacatcattgataattctaatccttcattctttttaaaatattcaattacaccattcaatgtcatatcaccataaagatcaaatctatcccagatcttatcgtattctttattaccatatttacccttagcacttgcaactggttcagaaaatccaaagaatggtaatgccaaattgacaaaaccattcttatatttctcaatatcagtcttattatctgcaactttgtaaagttcaagacaaactaaaccagtaactaatgcagttgtagttgcaattgcaggaataattctacctgcaatgaatttagtctttgatttatctgcaacttcaatttcataattttctgcacgacaattagatgctgcattaatgaattcaatatgatgattactatcatcatctttttcaaactcaacagttgataatctataaccagctaatgatgatggggatggtaatgttgatgataatgtttctataacagaattatcattaacagcactgccagcatttggatcaggatcactgtcattaacttgaatctttaaatcagtctttggactccaagctggaatttcaatcttacttaaaacattagcataatattctttatttggagcaccttgatcaccctttaatccataaacaaatgctaataagttagcagcacctgaaacaaattcaaaatgattgatgtcattaatatcaaaaaccaatggagttggagctctctttggactagtccagaagggttcacccttagatgtaactgcatccttagggaaattgtataataattgtttaatatcattagcaaatttttcttcaaactttaatcttgcccatttgatacaatcttcaaaattatatggtttatcagttgttaaataattatttattgattctaaaatagttttaatatcaccactttgctttaagacagtttcaacaaaatttggttgtgaaaggtataaattaacattttctggggaatcatggaaataatcttggaataaagattttgcccaagcaattgtgtgatcaattttatttgggaatgatcttaaagtacataatggaattgacttctcaggtggatctctagatgatgaatatgattcagtcaagtttggaataacaacttgtgtattacctttagtacctaaagtacctgattctaataatggtttcttaaagaaaacacatcttctatcaacataagttctagcttcaacattatctaatgcatttgtgacaaaatctaagttttcccaaaattcattattaaagatatgttcagtttcttcaccaaccttatcaattcttgattcaattttaccgattaaatcaggattcatttcacaaataactcttgatgaaacatctgatttatttaatccgacatcctttgatctaaataagaattgtctatttaaatttgatttttcaattgaatcattatcagttataaaaattttaccatctggaccagttgcaatacccatcattgcccaattctttaacatttcacaaccaattgcacctgaaccaacaaggaatatttttaaatttgccaatttttgttggaatttcaaaccaaaaacagcaatttgattatcatatctagaattaattggtttacaagtttcttctgatctttcatattcctctgattctggcaatgattctaatgaatcgaaatataaccattgtttgattggaacgaatttccctgaacatgcctttaaaacttcttgtgccaaaagaccaccaaagaatgcgaccattgcaggtaaatcacctcttgcaccatatgcaaattctttgattaaatcatcatcaattgaatcaacggaatatttggatttaagattgttagtgaattttaagatttctattgcatcagtttcattgtgaggtcttggtagttcattattatgaactttacggaattcatctaaagcttggaaagctaaatgtaattgcattggtctatcaaattttgcgtaatcagagattaagaattcaggctctaataattgttttgctaaaggttcataattaacattaattggagttttaacttgagtataaataccacctttttcatatgtaccccaattagcattgaaatcaactaattgaaatgcgaatggacctaaaactttgattttataaattgaaccatcttcatttaattttggtatacctttaacttcagtaaatttaacataatcattatcttccagaccgtgtctattatcatcaagcattgtaacagtaccatctttttcaatatctgagacaataccagtttttggttcttcaccattttgatcataaatagtgaaattttcaccaaaatcaacgaaagcttttgcaaataaaccattaatatcagctgaaataaatttaatattattttgatgagtaatttcatttaattccaattgtttatctaatgataagttagttgcgacaacaacggagaaggatttaataatttcaggtgataattcatcaattgctttaattgggacatattgatttaattctgcaagttttggtaaagttgcatgaagcacgagattgaccaatatcttgaacagttaagaagaattgtgatgataaatcttgaattgtaacagaaactggatcataaatagttaatgatttaacaccggcaagggcaacatttttagcaatttctaaacctaaaccaccaagaccaattataagtacattggatgaagccattttcagcattgcatctttacctaaaacgtaaagttgtcttcgaataaagagattcatcaatagcaccggattggaagtaggggaatctgtaggggttggtgtgtctacttgcatttgtcaattgataaaagaaagatgtttattaatattaataatgtaccactgcagtcttagtaaaaggtccaggtggcgaaaaaaggcctggattaaaaagagttgagactgtgagagcgatgtcaagattttttacttacttaagagttttatatccttaataattttattattaatcattacattctactatttcttcttatagtatagagaatatgcttaagtttaatgcgttaagacgttctgctatgcaggtacgtaagttagcaactgctagtgcagttagtaatacaagaatgactgttttaccaaatggtatgacagttgcaactgaaactataccacatacattgacagcaacagttggagtttggattgatgcaggttcaagagcggatgttagtgatgaaacttcaggtactgcacattttcttgaacatttagcatttaaaggtactaaaaagcgtagtcaaattgatttagaattagaagttgaaaattgtggatcacatttaaatgcatatacaagtcgtgaaaatactgtttattatgcaaaaacactacgtgatgatataccacgtagtgttgatattttaagtgatattttaacaaaatctaaattagagaaaaccgctattgaaaaggaaagacctgttattattagagagagtgaagaagttgataaaatgtatgatgaagttgttttcgatagattacatgaagttgtttataaggatcaaccattaggacgtacaattcttggacctattgaatgtattaaatcaattcaacaaaaagatttaaagaaatatattgaaactaattataaaggtgatagaatggttttagttggtacaggatgtgttgatcatgaagaaatggttagagcagcaattgaaagttttggacatgttccaattagtgatcgtccaaaacctttaggtacaccaagaagtggattaccagttttctgtaatggtgaagttaatgtaattgatgaatcattaccaaatttatatattgcaattacattagagggatgttcatggtcatcaccagattattttacaggattagttgcacaagcaattgttggtaattgggaacgttcagcatctgttggtcatacaccattagcgaaagaagttggtaatccatctaatggtaatgcaccattatgtaattcatatatgtcattttcaactagttatacagatacaggattatgggggatgtatgcagttattgatagagatgatgcaggtgcaactacaagatgttcagattttataaatgcacttaccaaagaatggaaacgtattcaaagaggtaaatttagtgatgatgaattagaggcatcaaaggcacaattacgtggatcccttctcctttcattagatggtactactgcagttgcagaggatttaggtagacaaatggttacaacgggtgtacgtctatcccccgatgaaatagtggaaaaggttaatgcagtggggagagatgacgtaatgaaatggctacaacaaaagagcggtcgcgtcggtgttgcgtcgctcggcccatcgacgctggaagtgccaaattttaaagaaattgaagagaaacttgtcatttcctaagcttttatactgtcaatgctcttctgattattgttagactgtaaataaataaataaatactcctttttatataaattttatatcctttatattcctttattctttacccaattgagcatgtctgaacaagaaatcctcaactcgataccatcacatgttgctccacctccatctggtcaaactgggttccctggttatttgacagattcagagaaatcagcccttgaacaattaaaattaatgttagaagctgaaggttatgttgaaagaactgatgattcaacacttttacgtttccttagagctagaaaattcgatattatgcttgcaaagaaaatgtatgaagattgtgaaaaatggagaaaagaatttggaactaatacaattttaacagattttaattatgaagaaaaaccaatagttgctaaattttatcctcaatattatcataaaactgatattgatggtagaccgatctatattgaagaattaggtgctgttaatattactcaaatgtataaaattacaactcaagaaagaatgcttaaaaatttagtttgggaatatgaatcatttgctaaatatagattacctgcttgttcaagaaaagctggtgtattaattgaaacttcttgtacaattcttgatttaaagggtatttcaattactgcagcttctcaagttttatcatatgttcgtgaagcttcttatattggacaaaattattaccctgaaagaatgggtaaattttaccttattaatgctcctttcggtttctcaactgctttccgtttatttaaacctttcttagatcctgttacagtttctaaaattttcattcttggttcaagttataaaaaagatttattaaagcaaatccctgctgaaaatttaccaactaaatttggtggtacttctgaagtttctgaagaagatggtggtctctatttaagtgatatcggtccttggagagatcctcaatatattggtcctgaaggtgaagctccaagagctgctcatatttaagtatagtttaatatatcaattctaatttctaatcatatcttaaaactaattagttataaatacacaaatatatcatacataagcctctactaaatgaaaccattttattttatttatatgaattttatctatattatttattaaatacagtacttttacgtttgaacaatttaaaccatttctttttatcttcagtaattggtggtgacttctccttcttaagttcaacaatcggtacttcagcacgcttgataacttttggttgtgatttaacaatagcaccacgttgttcaattactttcattatttcattaaatttatctggtaatttcttatcactaccataatcatcaacgacatttgtttgaacaacttcaccattaattattgatatattctcataaatataaacaataaactctttccaacttttatcatcatatatttcaggatcttcatttttttctaaaatattttcaatacttttacattctcttactactttttctgcagcctttttaatatcattcatcttaaattcatgtttagataataaattaccaaatgtttcatcctcttccttaatcattgatgtaaggaaatcgtcttcaatatcatcaaatccctcaatttgatactctttaactaattcatcctctttcataatattattaaattcttctcttatttccccttcttgttcatcacttgttaatattctaattaatttgtccatactcaaatatttatcaattaaatatgaagtattctgttcttcattattaatattactattggtattactcatattgaataatttttcactgaaatccattttcttcaatgtaactttatcaaaataatttaatacttcatttccatgcttctttataaaatcttcatttaatttcattaaataactctctttgtgttgttgaaattcgcttctatttgataacatcatcaatacttttgcaattaatattaatgtacgtgatattttaccagaataatgacttcttgataaattatataattttggattcagtattgcagggcatataaatcttaaaaaaataaatgaactcaatgcatttaatgcaacatctttgaattttgcatcatctggtccgttatttttcatctctgtctcaactgataattcaacattcattcttaagattttccattgtttctttatatttgatggtatatcattagttgaattataaattctattccataaatattcaagatatgttaataaattttgataattttcctcatatgattcaggttctatttttggatcgcattcacaattcaagtcttcttgttgaattttagcaataaattcacctaataatttttccaaatattcatgtccgactcttaatgtgaacttttctaatgattttgataaaattgaattaccacggaaaattgtattgtatttgaataagatttgttgttgttcttgatttttgagtaatatattagaatctgagagttcatacttaattaaagtttctaaatattcctcttccttttgtaaactttgataaatatcaagtaatactgttgaccaagattctaaatttttggttgtacatttaggttctatatatgaaacaagcatctctattttaaaattttttagaatattttcaaaacttttatatttattagttgatagtatattattttcaaacttatccaaattaactattaaatctccaataacttgatttcttaaattataaattggtattttccttaaataattgatttcaccagctaaatcatccaaggtgataaaacatgaacctattatctcatctgaattatcaccttcaatttcataagtatctctattatttgattttttaattaataatttaatctcattattatttgacattggtaattcaatttcaattaattctttccagaaagttgataataaattatcaattttaacaatatcacttcggaaccatggaatattccacataattaattcacaataaaaccatgattcatcattagaattggatttatacttatcattaaattgtgattccattatttccaatgatagtttccgttcatttcttaaataaatatctttaatgaatttatttcccaaatattctaatcttgtaaaagatttcaagattataaaccaattctctaaatcaactcttaaatcaaaatcaatcaataatttatctaattgttccaaattagatgttttagatattagattatgactctttcgtaattcatcaatgacaccaaggtataaaacatttgaatttcccaatattgaatgatgtaaaagtacgtatctctgattcaaacaattgttttatatcaatttgattcaatagtatgtcagttttatagaaaaatttcaatataccatgagaagttatatgacaatccactttgaaccatccataatcttctcttgtatataatggattaattggagtcgtatttatttctatatcatcaatttcattcggtattggagcataaacattcaatttacttactaatatatcctcttcaggtttatttaagtctacctttggattattgtataaccatttatttaacttaccactttgacgtaaatttttccatacgattgttgtacttaaaaaagttgtataatctttgaagttcttaaatttgaataaaaatgatgatggtaatgaagatggtgacaatgatgttggatttgtaggaaccgttatttgtaaaacataataatcttgaaatgttttaatgttgcattcgtgaatatcatttattataatcagggataatccagataccaatttaccattatttaataaggataaatcaacaaatttccaagactggaaatcgaatttactatatgaatgagaatattgctggcttgcataagcccattgaacattgggtatagtaactctaccatttttagtgatatcatattgataagccaattctttcaaatttgagagagtgtcactgatactaccatttgccattttctttatttgaatttaaactaactttcgaattagaattcgaaattgaaattgaagtagaaatggcgttagatgaattatgagcatgaattggcgacacattttgatttcgcaacatagaagtatattcaggcattgatataatatattatgtgaattaatacaatactattgtaattgaattggtaggcttgaaatatttaagaaccgtttaacgttgcagcttatagttgaaaaaaaaaacagctataatttggatagttatataattatagtaaccaattgcttagaactgcctatagtaataaaatttatagcagcaaaaattctcgaatttaaaaattgataagcaaatttcgataaaacacaatgtagctgagcattcctagagccattattatcttttacactttaaagtatcattattagaatatcactcatctgtttaattacttatttacttatttacagtcatatctattataggataataatcttattataggatatatactttataaagaaaaagaacaaagagaacaaagagaagagaagaagagaggcagtgcgaggtaccaattgaattactgtgaggcaccaaaaaaagaattgccttctcttatataaagtggtagcaacttgtatttccttttgtttatgactgttttaccttctttcctcctttctttctttcctttggcacctagatacacttcaacaacaacaacaaatacaactacacttaaaccttccacttacttaaagaaacacttttattctgtacttttattaatactttctcgtagtattcttttcttggctttgctttgcgttgcttcccaatcatgtcggatgctgtaattgatttcttgtattccatacaccaacttaagtttcaaataggttatatgatatggagatttcttgtatatttctccgttggtttcatctctgcaacaatcattgatttctttataaccccaagaccaattaaaaatttaaatatggtttatactccatttccaattcttaatggtcttgaaattatacttccaaaagctaaaagatgggaagattcaccttgtattcaatttcaaaatttagctaaaacttatgatgatgtttatcaaataaaatttggtaccaaacttataattgttgctaatagttatgaatctattaaacaactttggtgtagtaaaaatattaaggctaataactcaagacctatcaattatagctttcataaagttttatcaaagggaatctatacaattggtacaactcccattggtgaaacttataggaaatcaagaaaacatattagtgaaagagttttgagtgataaacgtaataatgattttaattatgttataatgaataatgcttgtgatgaaatgattgataaaatcataaatcaatcaatcaataataataataaaaatgatattgatattgacattgacattaaaccaaatttagtttcaaatgatatggttaaggaagcacaatatttccatttaaaagttgcattatggttaacctatgggtttgaatttaatattaatgatttgattcatcaacatttaggtgatgagattattgatgtggaaaataggattactaaagttagatctcatgttcaaaatccacaagattatttaccatacatcttaagattaggttttaatctttgttcaacaaaaaattatgagtttggtgagctctataataagagagatagatatttgaaaatgttttatcaatatgctctaaatctttatgatgatattaatagtggtaaaatgttgcataaattacaaagccaaaataattatacaaatgcaatcaataaaattgaagatttaaaaaacactttaatgtataattattttgatgttgcaaaatctaaacttgcaattggtgaaatcacttcagagtgtcttacaatggttagcgcaggtcttgataatacaccattaaatttcaagtatggattacatcaaatggttaattatcatccggaaatttgggataaagctttcaatgatttaattcaatactataagaatgattatcaacttgcatataaggaatgtgctaatgaaatgaaaagtgaatatgttaaagcaattgttaatgaaactttgagattatttacagttttaccaatgtcattaccgagagagagtactgatataattgcctataaaaatgcaattattccaaagggtacaaccttatttatgaattgttgggcagctaatcatgatccaaagaaatttccagatccaatggaatttgttcctgatagatggttaataagtatagttgataatgattttactgaaaagatggttactgatccaactatgaaacattttgcttttggtattggatgtaggaaatgtcttggtaataactttgcatttagagaactttacattttattcagtaagatgattttaagattcaaacctacacctgttacagagaggaagtatcaaacaattccgtctgataattcattgaaattgaatcaatacccggaatctcttgcaattgaaccggagccctttgacttgattctagagaggagaccatttgatgcagatattgtatagggattgtatatggtaaataatgaacagaattaacaccgatccatatgtactgcgtctattaatagataaagatcgatagacgtggtgctatgcaaatcccgtcgttatcaattaaagataaattgctcacattggatcatgttcattcggagataaatacatgggcttgggtaatataagtatttgtataaggttaatttctttctttatattttactgtgtatatcttcttcctgttctttactcttagttaaataaactcttattaacacaatggaggcattaacagattttgttaaagaagctgtatcaacaaccactcaaatcgcaacaggtgaagaaaaaccatgtcattcaatgcacaaaatgagaaaacatcattcaatgggtgataataatcatcatttcaatgctaacaacgtgaagatgaatcatgatatgcaccacggtatgaatcacggtatgagtagtaaaagtatggatcatgatatgccaaatatgaaaatgtgtaaaatgtcaatgacatttaatagtgattatgaaaatctttgtattttaactgataaattaatggttacaacaaagactcaattagtatttgcaatgattgctattgttttattttgtataggttatgaatattttaaattatttcttgatcaaatgcaaaatagatatattcagcttaaaaatggtaattttgcaactgcaagtgaatgtaagaaatttaagacaaagatttcgattatttatgctttaagtgttggttattcaatgattattatgttattattcatgacttttaatacttggataatgttatctgtttctattggtgcaggtttaggtcattacatttttgattcaccaaatgtttctgtttcttgtcattgagtatgtgttcatatttttcttaatctctttttgcttgttttggtcctttttacttctttcttatttcataagttcgaataactatttttaaagtttattaaatttctaactacataaataaataaatcaaattttacgtttctaatacataataccccaatctgatgttataagaactttaggatttctaataacaaaataattgtcctctggagtataaataatttcagattcccattcttcattcccttgtttgatatctgccttttggggtatattttcaccactaccaacaacaataatcttattgatagtaacattattatctttcaatgattttacaaatcccgatgaattattatgatttacaactccttcaataactctctttgaattatctgcaatgaaatcaacttcaaggtaatcaccatctttatatccgaacgtttcaccatcatcaacatataattttcctgttgctaatccatttgatacaataaccacatataatgtatatggatcatacctcattaattgagctgatcttctgtatctatctttagttgtaataatatttccactcttgatataaacgggtattgtatttagtgtcacttttgcattgacagtttgacaacattcaatcttttcattcaagttgaagaaattatagtaagtttcttcatcacatgggaaataaatatcaacagattcagcattttcttcaacaactggacgtataaatagaccattcataaagaattcattatcaatgtcatatccatttaaatcgcttggattctcccatattaatgatttcataaccggttctccagtaatactactcttccaaaattgagtataaaacaatggcagtaatttatatcttagcttgattgcatctctcatataatctgtatactcacctcctgcaatccaaggttcacgtcttcttgaatctatatgggcatgggctctaaaaaatggataccaaatacctgtttgataccatctaactaataaatcacttgttggattaccaaaaaatcctccaacatctgcacctgcaaatgggaatccaacagcattcattgttaaaatcattggaactgtttgttttaaatgctcccatgttgacatattatcaccagtccacattgctgcggttctttgagaccctgcaaaaaatgatctagttaaaataaatggtcttttacttggatttctatttaataatgagttatatgtaagttcatgaaatgataatccatataaattatgaattgatctgtgttcccaatcattgtaatgaaccagatcttttggagccgatgtttcaggtccattaaaaatagatggttcgttcatatcattccacagatgcccattagtggaatatccaagcagatcactaccattgataaattgtttattccaaaatgcctgtgatttaggattcaatgaatcaatccaaattgaatctcccggccaacaatgtccatgatatgtcttttcaatacttttactattgatattttgtatacctaattgtttatcaattattaagctggaaatatgataatcacttttaatatgtggatcaactataacaactaattgacgtctagtttcatccaaaatagacatcattttatcaggattagggaataatgatttatcccatgtaaaaaatttcttttcatctgtgtattcaatatctaaccatatggtgtcataaggaatttcatgtttatcaaaattagaatgaacttcaagcagatcctcttgattattataattccatctacattggtgatatccaatcgaaaataagttaggtaatgttgttgatccggtgatatcactatatgcttttgaaatctccataggagttgatttaactgataaaatgacatctattataccattctccgacatccaatgtgttttaactgaagtagttgaatcatctttccagataaattgggtatctttaaaatcattcgccacgagatttttcttaatatcaatgtatgtatctgcagaattaatccagaaaatagaagcagcaacatcttccttaactgcgatcattaatgggattgaaccatacattgacagtttgctctgaacttcatattcaaaaatatcaacattaaataacctgtaaggatctgaattagtagtatcttttaaagagaatgagtcagagtgttctgggataccataaacatgagtataatttacaaaagtaaaatccaaaccaactgattcaggacctaatggtaatgtatcacttttagaatctttaaaagtatctacaaaactattaaatttagattcttctaatgaaacattaatttgatcaaattcatcattttctctataatgttctaaatttaaaaaatctcgatcatttaaaatgatttgtttgacattattgtaaaaaactgtgattctaaatgggtgcatcataataatacttttatattcattattttcaccataaatcattgtaatttcatcatctaaaatttgataattaaatgatttttgagtcagttctgaattaaatgcccatatactagcttcattatacctctcaggatttactttaatatcttttgttatttctgatttcctatccctttcatcaagtttgaatctcaaattatagtcttcaacaatagatatctcaaaaacaagatccttaaatgaaccatcattgagctctttttgcatcataccgttaaataagccattttgctcgtcaataacaaaagttgatctatctagttgatatttaggttcgtaattctcaaatgatttggatatttcggaagcaaagtgtcgatttctatgacaaaatccattttgttcacatttcttaaataaatattcctttactgcatttgatggtgcaaataaaaaaagccatgtaacacagtaaagccattgaattatcattattgtacttcacaattgtagtaatcagacaataaaaccattctttcagcatcacctgggtattcttcacattttcatgtagcgctgggttttcaaatttttaacgtgtttccgtttgtttactcttcatcttcaactatttcaggggtatatatcctcatataacgaagacaaattgatgacaggagagatattgacattacaggcaggtatgtaattacactattattgaaaatttttaattttgaatactaacataactattttcaaatattttttatttttttgttcaggtcaatgtggtaaccaagtcggttcacaattctggtcacaaatttgttcagaacatggtatattgaacgatggatcaactgtggaaaactactctactattgaaaggaatgatcatccagatgttttctttaagagaagtataaatgaaaaatatacaccaagagctattttaattgatatggaaccaagagttataaattcagtagtttcacgaaaccaagggttatttgatccaaaaaatatttttatttcatctgatggtggaggagctgctaataaatgggttgaaggttatgttaatggtaaaaaaaatatagaaaaagttttagaaatgattgatagagaattagattcatgtgataatctagaaggttttcaattagttcattcggtttctggaggtacaggttcaggttttggttcatatttacttgaaagtttaagtgatcgatatagtaagaaactaattcaaacagattcagtattcggagcttcagaagttgtcgttcaaccatataatacaattttaacattgaaaagattaattcaaaattctgatgcaaatatagtatttgataatgcatctttaacacaaattgtgacagaaaaattaaggattgatacttttgaacatgatatacctaacaaattgatatcaacagtaatgtcagcttcaacaaatacattaagaattccctcatattcatataattcgcttacaagtatagtctctactttaataccgacaccggatttacattttcttacaccaagttatacaccgtttacatcagattatgttagaaatgcagcaaaggaaattcgaagaagtacatcatcggatgttgttttggatcttttagataaaaatttgaaaatgtgttgtaagggagagaaagaggaaacagttttagcaatgatggatataattataagagagaataaattaactgattcaaagcaaagtatcaatatacagaaaacattaatcaaggctaaatcgagactaaattttgcaccatggactacatcatcagttcatttagcaatgagtgaaaaatcaatattcaataagtctgataagaatgatgatatagttagtggattaatgttatcaaatactacatctatagttaatctactcaaaaaggagattagaaattatgaaaaattaatgaagaaaaatgcatttactaataatttccttaaaagtgattatgatcaagaatgtggtgatattattcaagaacttcaagatagtaaagatgttgttgaaagtttaattcatgaatatgagaaaagtgaaactatggcttatattgaaggctctgatgatgaattagatggtacaaatgatactgaagatgtaatcatgcagtaattatgaagttaattgattagagtttatatattattttgtattatagtttatatagttttattattagaagataagacgataattgtactatattgttataaacacaggtaaatttgagtgatacagataagaaaccccacgacacgtattttgttgtgtttttaaaaatgtttaagttttagcatagtttttcaagatcttatgactgtattaaactttataagcactgctactagtacactggctggcgcaatgttattttaatggtatttaaaacaaaattagttaattttgtaaattttcaaaaatagaaccctaagtcaaacattcaaaacaatttagttgttcatatttaattatttcaaaaaaatttttttttaccaaaatttaccactttcagccacccaagagtgcctccagtactccccatcttttatcatactaaatatgactataaaatatccaataatgtacacattatacaccatagaacataatacactgttactaacggtcctaatcgcttcagtcccaccctctcggaattattaccgcattcagaatgaactgataagaaaaaaaaaaatgaaatttccagataaattatcaacttaaaagaacaggtctgaagccgttaatgatcatcgactgatttctttgatgttgactatatctacactataatgcgtaatagtgctgaatacgaagtatctgcggatgttgtctcattcagaccacattctctgccaagtacacattatgaaagacgtccatctattgctatgagcggtattgatccaaatttagatgactcagattccgaatcggattcagaaattgaatattcatcaaatattgaggatattaatgatgatttaaaattcaaagaaggcacagaagttaatataataactgaacatgttgttgaatatccagaaggtggtaaaattgcatatttaacattatctggatgtttccttggattagttggagaatttggtctttggaattcaacaggtgcaattgaatcatacatttcaactcatatgctaaaaaatgataatgaaattgcaatttcaatgatttttgcaatattttcattctttgttatgtttggtacaatgatttcaggtgttatctttgataaatatggtggtaaacaattatgtttaacaggtacatttttaacaacatgtggattaatggcaactgcaaattcaacaaaaatttatcaatttattttatcatttggaattgtttgtggatttggttgttcgttattaactgcaccatttgttacaagtattggtcatttttttaataaaaagagaggtagagcattatcaattgcaatgccaggtgcatcacttggtggtgttatctggccgttagtttgtagatcattatatacacaagttggatttgaatggacaatgagaactttaggattttgtattggtacaattttattaattggatcaattttgactcatgatagacataaagagattaatagaataaaaagattgaatgaaggtgatggtagtggaatgtcatttacagaaaaagttaatgatttacttgatttcaaatcatttaaagatttaacatttatgattcttacatgtgcattatttttaaatgaattttcacttttaatggttagtacatatattccatcatatgcattaagtaaaggattttccgagagtacatcattaattgcattaacagttttcaatgcagcaggggttttaggtagaattataccagctttcctatcagataaatatggtaattttaatctgataattttaatgtcagctataatgtcattatcagtttggattttatggttaccatttggtaaacatttaggtgcatttatggcatttacaattattttcggatttgcagttgcaggtacacttgcattaacaccattatgtacatcagcaatttcaaaaccaaaagattttggtaaaaggtatggaactgcatattttgttgtttcattttgtaatttgattagtttacctgttggtatggcattaacaaagacaaaaggtggttataactcaatggtagaatttgctggtgcaacatgtactttggctacatgtttcttcatttttagtagatatagagttggtggaatgagaaaaatcaaaatatgagatgttttagggtatttatatttatttatttaattatttagttataggattatatagattaagtcagagtacaaattcttttttataaattaccaataccatcccagccagtactgatactttgagttgatagactttcatctctttgccaaaaatttctatctttaatatcattagtttcattatttttattctttatatcatcaattacaacattacccatattatagataatattatttttatcataatttgtattaattaaattatctaacatcatatttttccaattaccgggtatacaagattctaaatctggattattcataaagataccttcatgttgaaaatcatcagttttaatcaatgcagtatttaatttatttaaaattcttttaaattctttaattgagaattatttatctcttgaataccatttgctttctttaaatgataaatttctataattgttttagccattttagttttatcattaaaaaatttcttctttttcttaatttcatatgtgctattaattttattatgattatgagttttattctctataccacttaaacctttaatccaattatttattttatcaactaattcatttctttgcttttcctttgtatcatttaattttaatccaattaaattattcatttcatcacgtacaacatttatcaatgaatcatcatcaccttcatcatcataataaccatcaacatcaccatcatcatcaacttcatcatcagatataatatcaaaatcattaatgacataactttccctatttgaaattgtacttaaaatactatctttttcaatttctaaatcatcagttaaattatcactatcaccatgaattgtttcacatttctcattaactgatggaatattatcaaataagacccagtctgaagtttcacctgttaaaaacccagatgaaatcagtgttggaggggaggtgttaatgtggttattttcctttttagtgtcttttgataaggatttaatatttttagatttaacaccactttgaatgatttcatcggtaaataatgtctgtgttaatggttgaatctgttgcattacttataccttgtttatttatcaaactatccagtgataacaaatgaacaagtaatataacaagtttaaatagtgagttaattaagtataaaacggatttctgggggataagaacgggatctttctaagagcgataagattaaaatttcttttttcacggtttttcgatgatgtcattaagttatatgagctattcactattaagaagaactatgttattatatcatgtaaactgcagatatatagatataaaagatagatataaaagatataaaagatatgaaaataaattaaaattaaattaaattaaaattgaaactaaaattaaaattaaatgcagttttgctattttttaatgaaaaagttttaaacagaaaaggtttagatattttttttatgttttgatagtataaggaaagactttaagatgataataataattattattatttattattattattattaaatttatattgcagtaataaaagttgtttcattataaccataaccagtttcatcaacatcaattttatcatttttaataatttttaaattcatattattactaaattgataaacgtaaggttttgtaccagctacaccactaacaatatttttaacaaattgaggaatttctgccataacatcaactctttcacataaattatctaaattaccattaatttcaactttaattgaattatcctcattatgcatattataagaaattttagttggtacattccaacctgaagtttcatcaattttacaatttaaatgttttgtatcattattcattgttgctaataaaattttaccatctttatttgttacaattgcagcactaacttttgttttattatatgattgaggagttgtaaattccattataacaacagaataattatcagattgataatttaagaaatcccaagttgcagctgcatgatgaggtttcataccttgtaatgccataacaaacattgttaaagaattatttaaattaattttttccctttcaatatattgaacttgatcattttctaattcatctaaattttgaccttcctttaaatcacgtaaaataatttcaccatttgaataacatcttggccaaaaagcgtgtctcattgaaccccaaggattttcaatatcagtaccataataagttgtaccatttttaccaaatttaatactttcaccaatttttttaacaattaaatgaacttcagttaatttattaacacttgaatcaattttatattcattaatattttcaattccattttctttattaagaacaattgaaaaatcatcagctataaaatcagtttcattttcaattttaaaattttcaagttttgttgaagtccaaataaaatctgttggattactttttgggaaaattttaaaagtaaattgagcagttgtatgtaaaccaattatatttgaatgaattaattgaacaaaacctgcattaattgaatcttcaaaatagaaaaccatcgtttcaacattggtatgatttggattaacaaattttaaatcatctaaagttaaaggtaaatataatggatcataagcttttctatcataattaactggatgaattgaatcaggtccatattcaggttctgcagttcctgcaactacagataatccactttgtactaatttccacattatataatgttaatagtaaaataaccaagatcttataataaagtgaaacttaaagtcaaaatttaaaatccaaaatccaaacttaaaaccaggatcattaaatcagaaacagatcaagcccgttaatattatttagtaaaatgacatgttaggagactatatgtttagtaggaaaaattttatttttttacccttcatgttttataaggtgtactgtagagtattacgtaatatttcatatcaccaatctattccagttgttattattattattattagattaagtattaaatagtataattattacatacacacttaattaaatcaatcttcatcatcacttaaaggtcgtccaatatcttcttcatattcatcctcttcatcctcttcttcatcaccttcctcatcatctcatcttcttcttcatcttcatcataaattaatgatgcatcaaagaataatgatggatttaatgcacttatatcacatgaagttgcttcaccatctaaaattaattcactcattaataaacctgttgcaggtgcattatttataccccaacatgaatgtccacttgctaaatataaattatcaacatttgtttcaccaattaatggacctgatgatgatggtatatctaaaactggtaaataacatgcttgtcttttcaaaactttaccattttttaaattattacttaatttggaaacatatttaaataattcttcacatttttcagttacaacttcaacatcatcagttgtttcaggaattaaaactgatgaatcaccttcaccacaaacataaacttcatcctttctagcataaatttcaggactaacaaatttatttttatttaattttaattcagtgaaaactgcatatggactaatttcttcaacattttcaggttgaattataattgaatgagctcttaatccactaattggacaatctggtaatatttttgatgtccatggtccaattgataaaataactttatcaccatataattcaaaacttttatctgttataccttcattttcagctttagcacttgatggatgataaattataccattacaattacctgtttcttcatcaattataatatcatcaattttaccaataactaattcaacacaaccagttgaaatacattgattaagtataaaagttgtaaattgatatggatgaacttgtgcagttgttgattcattacctaattgattccaatcattaataacttgatcattaatccaacttaaattttttggtaaatgatatgataatttttcagcagaattagaattatttgattcaatttcaattgaatttttcttaattgttgttgctctactcattggtttactgccaagatctaaatgtggattattagggttattagggctattagggctattattattattactattattattgctatctcttttcatttcagttattccattatcaattttatcttcttgaatattatttaatcttgaattagttcgtatactattattactatgattatgattatctttgtcttttatattattatttttatttttatttttaattgaatttaatcttgaatcagatatatcaccttcaacactaatagttgttaaccttctatacccccattcagattcaccattaaattcatttgataaatcttgatgtaattggaaacttaaaggtacaatttgttgaggaaatgcccataaagctaataaaccacctgctttaccacttgcaccacctgcaactcttttactttctaaaatagtaatataatgtttttttggatcaaattttggatgtcttgtaatataaaatgcaatacaaacaccaattataccagctccaacaataatataatgagttttacccttatgtttaccagatggtgaagttgaatatgtaataaattctggttcttcgtcaggaatatttgcagttgtctttgatgatgtcatttaatttaatttaatttaatttaattatttgatggtttaattaatcgcctcttgtatgtatctatgtatttattgatagttataatttcccaaatataatccacttgtcaattttaagattaagatgattgtacttgaaatgtatagaagaatataaatataccaatccaatattctccaagacaaattagaaaagatgcattgaataaattctcaattacacatcatagcaaaagtggtctcattcagtataagtttcagaaaaagaatgagaaaggagacagcctgaggaaaggcctatttcgcgagaatatgcgtcgatgcggcggtacgtctcttttatgaattggagggtcgatgcgtcggggctttttttattttttttattttcgtaatacactttcagtacatgaattattataaatcgattatgaagagaaaagatattaaggttaaagattaataatacagactcttttatcaaaagcaccatgtcaggactctcagaagcctttacagagaatgacaatgcaattgctcatcttctaagacaagtagtttatcttttctatcctcatcaatgtattgttataatggaagcactattatttcatcatgtacttttcgaagatgatattacaaaactttgttgtatgcacaggaaagttttccgttctttttgtaatatattagttgaagataaattgatttcaactcatattcaaaaggaagaagctcaacaatataaattatattcaagaacttattattatattcataatattgaagcaatcgatgcaattaaatggaaagttcatacaattgttaaaaaagttaaacaagaaattggtaattttagtgaacctcaaggttatatttgtccaacttgtcatcataaatattcacttttagatgctgcttctcttttaactgacgataaattaaattttgaatgttcaatttgtaatgattatttaattgatgatgatatatctcaagaacagaaaaaaggtcaagaaaaattagagaaaattatgtcattagttgaaccaattattcaatatttgaaaattgttgatgatttaaatattgatgataataatttcgaatcaactttaatgaaatatgtacctgcattctcagattctttagcactttattctattgctaataaagttccaaatagacgtaaaaataataataataaaaatgatgataataataataataataataataatgatccaacaaagaaagctcaagcaacaattaatgtctcaattactgccgatgatgaagatcttaaacgtgaaagacaaaagagagaagatagaaataaaaaacttagacaaaatgctttaccttcttggcatcaagaatcaactgttggtaaagctgcattaggtcgtttagattttgaaactgaatctcaatttaatgattcagaaactattaattcttcaaataatataaatgaaatgagtgatataaatgatttagttaaaactgatcctgatgcttcaactttactcaatggtagtactacaagcaacaacagataatattaatgatgatgcaaaatcatcatttgcaggtgataatataccaccttcattaccttcacttacatctgatacattatcattatctaattcaattacaaattcatcagcaattacaaattcaatacctatttcattaagtggcaactcacaaccgcaatcacaatcacataactttattacaaataatgaaaatacaacatcagaggaattcgatgcattatctgcttattattcacaactgcgtcaacgtcaagctgttgaagaacaggaagaggaagaagaggatgaaattgaacaagaagatattgattatgatgacgatgatgataatttagacgattttaatgataatgataatgataatgaaattattgaaaaagatgttgaaattcaaaatattgattctgtaccattaatcaaaaatgaaaataaatccgaagaaattaaagaagaaattgatgaagatgattttgatcttgatatgtttgaaagtgataatgaataattacttatgattaattatcattaattattaagaaatgacactttgctaatgtatttacataattacgtatgtatgcaacttttatatatttaatttatatatcctttttactactataaaagtttgattggttttttttacttgagttgttaaccctgttttatcacctacagcttcatttagaaacaattggtatacgaccaatacgcatgtacaacgtccactattactaccactattttttttaatacctaaaatattgtttcatcaatatgatacataacatacaacggtacatgactataatgccagaatagaaattttttgagtattatttatatacaacctaaactcccatattttgtaatggaatatcatgtaatggagagtctgaataattacctgaattatctcttgaacttccttccttattagtttgaatattatcattattatcattattatcattattattatttgtgtgataattataatcaacatactgtgcatttctttgattattccatggtttataaccatcctcttcatcgtctttttcattatcatcaaatctatttctatcattattaaaacgtgaatttaaatcagtatatctattacttgaacttgcataactacgagttctagttctagttggattaccttcaaatgtgttaaatcttttaatacctttggtatattgttcagccgatgttccagaaactgtcaaaacattagataatccctttcctaataattttaaaccttttttagcaatttgattccatggcataacaccatttgaaatattctcactaattgttggttcatgattgattggtcttgatgattcagttactgcacgtgaaatacttgggaataaacttgccatttcttcctctgagtcaaatgttctagttcttctcattgtacagtatgcttcaatatcatctcttaagttcaatttctccttggaaagcataatcgctctatcaattgaattaggtaaacctctatgtctacctctaattaatgttgcaacaataactaatttggataactttttaaattcaccacaaaatgaaacattaacatttggatatcctaatgataatccaactgtaccatatgctgaagtaacttcaaacataatttgaaaaattccaaatctcaaatcaccagatttaattcttccaccttctacaatacaaataatgaaaattgctaaaaataaaaaccataaatcaaatgataattgttttcttaaatgggctccaatataattcaatttaccctttttatcatcatcattatcatcattaccatgatatatacccaaagattgttcctcataaacattagttcttctaatagaaattgctaatggtaaaacagatatatacatcataaccaaatagctcaattgaatagctggatgtaatgtagctatatcaacaacattaaaacctgcagttcttgtagagaatgcttgatacaaaccagctagaacttgataacctcttggtaaatatgataaaacacttgtaccaaaatctaaaattataaataaaatccaatcaaacatattcaggaatactaaaactgctgttaaccaccatgtaggacctgatggaaataacattgtaaaacatcttcttggatgatcaagtaaaaaacttaatgagttatgtgtcatggttaatggcttgcaaaataatctcattacccaaataattagtcttagaaaaatcgggaatgcggtattaccaattaaaatgaaaaatcctgaaataatcaaagtatatgcattttgtgcaaatggcatcattgatgcagcagttaatgtatatcctaaatcattgaatgagctcattgcagtgaaaaatgcccaccaagtaggtgaaataccatccgctctgacaacattgatatattcttgcttattgttaatgtatgcaacaaaaaatataatattcagaatatgaaatccaacataatatgaaattaaaatttttgttaataatttcattgattgatattcaacaccacccaattctgctttctcttcagctgataatgcaataaatttggaattacgtccaattttaggatcccatgaaagataatttgtaggtacatttttcaatccataataatcaatcagttcatcatcacttagttcagaaacattactcattgttctatttttagatttcaaactaaaagttcttccaaaaaagctagctcttctatgattatttggatgtctacgttgattaaatgattcatctccgcttgtttcatctgattcagattcattatttaataataaatcagaatcaccccttccatcaactttattatttgctgcactaatatcaaatggtgaaaatattttttttgaaaattcatgcatagtatgtgaatgttcaagtaatttatgtttttctctactaggcggtacaatattcttatttttttctcctgtttcatcgatttcattatgatttttaccatttgccagatccaaattagattcaccattgatattaaaatcatcatgcagaacattttccagttggcctttcaggaagtttttctcattctcaacattctccataatttctcttgcttttctcttatgtcttttcagtttatgttctttgataaatttctttcttcctaaatttgacttacccttgcgatgtttccttaattctcttgggcttttaatatgtaatgcagggccaaactcaatgtcattagttgaattattcggttctttttgaagggcagaaatagacatatataaatctcttggatccaaatctcttttcttgtttttacgaggtttaggtagctcaccaaatttaatgtttgttctggtaggggactcaggtaaattattatgttcgttattatttccatcttcatggtcatcatcaatctcactatcaatatcactatcataattatcattatgattataatcatcctcatcctcatcttcagtcggttcacttaaatgacttattgcaccaccatcatcgacttcatcattatatcctaatttttgttcttgcttttcatggctgcttgaagtagtagatccatttaaagattgattatgaactttagaattataatctgtgtttaaatcaagtttcaagttttgattttgacgttccatactattattatttgagtgatttttcatgttttcaaatcttgccattctactatttaaaccttcagaagcattatgactttcataatttctaccttttctattattattttgtgatgaagtaccagtcattgttcttgcactagtttcagatcttaaatttgcaattgttttgcttctcctcatattatactgttgaattgaactaattttaatattatcaaatcttttctcataccaatacaatcttaaaattgtgaggaaactatgaatgaaaataggtgtagttaacatacaaacgacatacaccgcaatttgttgatataatttcaaattatttaattgttctgtagccaatccaccctgtgtacaactaccagctgcaaaaaccaatgcatcaatataatcaatatttttctcaggataaatgacaactgaacataaaatggtcatgaaaataatataaacataatgagctataataaaattaggtataattcttttcacaattggagataagaaatcttcaatcttataaataacctgacgtatagctgcaaatgtactgtatctgaatttattaaaattttcataagtttcatcaacaactgttgcactacgttttaaacgtttacctatattacttctgtcaaatctattactgtatttcctgtgatcgctatatctatgattatccgtattgtctgtattattattattattattattattaattttggattctgattcatcacccacgtgatgactcctatccatagttgatccatcaattgaactcgaaccactatgattttccttttcactttcgttatctgaacctttctcatgatccttttgattatgtgttatatgaggaatgaaacgattaattccaggtggtaaatgcaaataattatgtgaagtatctaaaaatccatcactgctatcgttgtcaattcgggtaactatcctttgaggatgtctaattcttgtattatttgcagcatctgatgagttaattgatgactcatttaaccctgtgtcatctaccatcacatgaggtatatcacttcgcagtggatcaaccatatctaaactaaagctctatcaaagtcatcaaacagtatactttctcaattcatgctctgagtttattatatcaacatgcagcctctgaaaaaaatttaaaaaacaattgaaatttccgagacgtttttccacactgaaatttccgaggttaggtttccaatgattagcatgattattatcattacaatttcaatgattatgattaatggaactggaagtagagttggaaatggaatacaatagcttgtttaaatatacaacactctataatggatcaaaatagacctattctgagccgtgtggcaacatctgcaccagatgcatccactgcaattgatagatcaatcacagatttcccagttgctaccccaattgatgaagataactatttcagatttcataaaccacctgcatatctctcacaaataagtaatgatgttgctagttttatcaactataatcatcaaaaacagaggaaagtagtattagttacttcgggtggtacaactgtcccacttgaaaataatactgttagatttattgataattttagtgcaggtacaagaggtgcaacatcagcggaatatttccttgaaaatggttattcagtaatattcctacatagagaattttcattactgccatattcaagacatttcagtcatacaactaattgcttattagatcatttaaaattttctaataatggtaataatgttgaagttgatgatgatttacaaaaagatttagtctcagtattgaagaaatatcaacaagttaaaaatgaaaatagattgttattagtacctttcacaaccgttcatcaatatttattcactttaaaacttattgcacaagaattatcagtaattggatcagatgctttattctatttagctgctgcagtctctgatttctttttacctagttcaagaataccagaacataaaattcaaagtcatgatcatggtggtaaattagttgttgatttagaacctgtaccgaaatttttgagaagattggttgattcatgggcaccaattgcaatgatcgttagttttaaattagaaactgatagttcaattttaattaaaaaggcaacaactgcattagagagatataatcatcaattggttattggtaatttattacaaacaaggaaaacagaagttgtctttgttactccaaatgataatgaatggattaaattatctgaaaaagatatcgaaaatcaacttgaaattgaatctttgattataccaaaaattgttactttacataaagaatggatcaagagccgtgatgatcttgttaaataatattatatctatatctataatagtctgtttttctaatcttatttattcacatttttaacttttataagaaagaaattcctataccccactgtaatccacgacgtatagaatcattagcattagcagttacaggaacgacccaattcaattcaaatgctgccattggatgtgcaaatgaaataccaaatcctgtacttatacaattatttttgaaaacatttgatgcagcattagcatttaatattgaaaaattatttgttaatttaccaatatttgtaaataaatgaaatttaaaatttgaatcactataatatggtatattagagaataaattaagtccaattgcatggaaataattaccacctaaactcatattcatttgctttggtcccatacctgaaattaaccaccctttcatatcatttgcaccacccaattgaaatttatccatcggatgaactaaatcattatataacggatgaattaaaccagttttaaagttcagattaagtattaatgatttattgattctataacccttcgaataatcaaatgatgttttgacaaatttatttttagtgaataatgataattcatttgataatcttaaataataacctttctcaaaaatatattgtttgtctctcgtatctttaaaaattgaatatgtaatcgaagatttataattataacctgcattgaaaagaaagaaatttgtcattaatgaattatttctaatagaggaagcaacagatgatgatggacttttcaaactgatagatcttaataagttttcaattgatatttcatgatttaatttattctccattggtaaattatttgttgaaaatttcagtgttaaaccttcaatagattgattatgatatgatgtataatcaattgttctcattgaatggaataagattgaattaaatttataattagctgaattaaatattggacttgaatagtttactatgtattgtgatttacttgatttcattttaaattcattagatgataaatttgtatctaaatccaaagattcaccacctccaaatatattcttccattgtaatttaacataaccatcaccttcaccattaccaacatttgtaccaattttaaggaaaaatttctttactggaacaacttgcaaatttacaaaaatattcagtaaatcaggattaaagtaattatatggttgattttcaggtactccaatttgacaacccatatttgaaattgaatcagtctttaaaagattgaaatttacatcatcaatccttttcaatagttgagagaatgtaagtgatctaccgttatcattaagttgtgatattattggatcaagctgtgcttttaaaaaggagtttctatatttaccgtccgtaccaagtatgttaaagtttgttatatttacaggtctagattgattatcttgaacaacttgtttaaccgtattaaaattatattgatctagtatattttgtcttttaagttcttcttcctgttgaaatgaaagtttattctcattaggagagaacattagtctcctctaggctactatcaggaccgttcatactgattattgcagtgtctcaagaaagaaactgaactaacaattcacccatgttaaagtgaaatttgtacattaaggcatgttagtatctcatgcgcttatgtaagaacgggtatatttactttcattaacattaacattaagatatataaaagatataggtataatatactagtctaacctaaaagagatcaacccatgtaagccatttgaaccatttaggttctactaataaacattttgcatcagcaactgcatcaccattcaatgatttaatatcaccattaatcttaactttcctacctcttgcatcctctactttagccgttagtataaatgtagaattcggttgaagtttaccatcaaaattaacattaagatttgctgtaacacctctcttatttggtaatttatcaaatccacagaaacatagtgattcatctaataatgtaagtactataccattatggattttcccatcaaaccctacaatgtcagcatttgcagttttaccgaaaagtacaagttcaccctcctttctgtcaatcaacactattggatcatttaaatttagtaatcctcttgatacttgattatatttatgtgcagctggtattaatttttccatatcaaataaaacataatttttacttgtatcattaatatatttttgaaatacggaagaatctttaaaatgttcatatgattgtaattttgcacattgttcactaattgaaaggttgctcttgaatgatttatgctgtaccaattctctaggttttgtccaaataggtgaatcaggccatggacgagcaaatagagccaaacccaatccaaatgatgtaaccaccaccgtcccctttgcaaatgtacccaatattcctctcactacacccattatctttcaaatcagtatactttctaaagaacatttaactaataacagcattaatctatacatttcactaagaaatgaaatttaatttgacatgtgacttacccggatttaatcagtcgcagagacgtgtttacaaaatttcaatttctatagcaatttacatctaataacattaacatcaatcttgaattgtctttgtgattgtacagtttaattgtccaataatcacactgtccataaggtaataatgtcagaacaagggccaggacaggaacaaatagaaaaagtaaaggaagaatctagtgaagctttgaaagtggaggattctataaaattagaagataccgtcaaagaaaccatagtggagaatgatgacgtgcaaaagaatactcccgttgttgaacaaaaggatgaatcaccatccaaaaatccagatgatgaaggtagtagtgaattggagaaaaaggaaattgaacctccaattgatgaaactgatgatatggattacaaagactttaatgaaaacgatgatggtgacgcggatgatgtcgatggtgatgttgacatggatgatactagtgatgtcaatgataatggtgataatataactaatgcaattggcaaattaaagaaaatgaaaaggaaagaaccaattgataataaacaagaaccaacatttgttgaatcaaatcttgaaagacagactcatacaattgttttaccatcatattcttcatggtttgatttgaataaagttcatcaaattgaaattgaatctgtttctgaattctttcaagggataaataaaaataaaagtcctgaaatttatatgaaatacagaaattttatgataaattcttatagaataaatccaaactcatatttatcttttactgcagttcgaagaaatttaattggtgatgctggtgctttattacgtatacataagtttttaaataaatgggggttaataaattatcaagttaatccagaaacaaaaccaaaacagatagaacctccttttactggtgattttgtagtagattttgataccccaagaggtatgttcccatttgaaagttataaacctccaactaattttcctgatatatccaatgttaaagaaattttagctcctaaaaaaggatttgatattgagacaactaataataatactcaagttgaaccatcaaataaaagacgaaaaattataaaacctgatattaataatggttggagtgaagatgcattacaaagattaattgatggtgtatctaaatttaaaaatgactggtataaaattgcagattatactggaaataataaaactccagatgaatgtattattagatttttacaattaccaattgaagacaaattcctagaagaaaacaaagacctattaggtcctttaaagtatgttcctaatttatcattctccccaagggacaatccaattatgtcaactcttgcattcttagtgaacattgttgattcagatgttgcagttgcagcatcaaatagagcaattgatgttgttaataaaaatatagaaagtaaattaaatggttcacataaacaaaaagctgaggaaactgtaagttcaaatcaaaaaaatgaaactagtatagaaaaagataccaagaatgatacacaggaaggttttgaaaaaacgattgaacaagaaaaacctgctttgaataacggtaaagctgataatatagtttcatccgttaaagaagaggaaaatcaaaataccgaaaccaataatgtagcaattgaagaggaaaagaaagaaaatggttcagcaggggatggtaaatctgaaactcccgcagttgagattgggaataccaccgataataaaggtaatgaaatagatacaaatacagatttgactacaaaagactcagataatgataatactaagacacaagttaacgaaaccaatgtatgtgatgataatgataaagaagaatattcaagagatccattggttgatattaaagatgctgctgttaatgcttttggtatattaggtgctagatcacatttatttgccacatttgaagagagagaaatgcataagtcattagtaaatattattcagcaccaattgaaaatagtagacatgaaagtctcgaagctaaactcattggagaaagagtttgaaattcaaaagaaactattggaaaagaaatcaattgaactattagaggaaaaattgagtatttttaagtacaataatgccgcaacttccaaacttcttcaagcaatttcaattattgaatcaacatcagattacagtcaattaaacgtcaataaaattgaagagctcatatcacaatccaaaaatatactttataaacctccaagaaaacaactcaatataattgaagaaaatgaagattcaacatcaacagaagaatccaatgaatcaataaaacctatcagttttgaagctcctatgttgtataggtactggagtggttagttttatttgtatagtatgcatgtatcaatatacttgtttaatgtattaaattcgtcctttacagtgtaaacggtataggtatattttctaacggaatatcttgtgttaagataaataatatgtacaaatgttttatttacaaaaacttatttaattgttctttcttggttttattactttcactatcagtgccatgtattgcatcattctcattaaactcaattttctttatcttactgaatgcctctcttaacttctttttatctaatccatcaacaccttccacaatgacaggacttaattgaaaaacatcaacaaaacgttcattccaactcttcatagcatctcttgcttcctctgtcgttattctaccttcttcagcatccttaataagtttattcaatactctaaacttcttttcaaaattttcatctaattcttctttcaaattcttttctctcataatatttaatgttgaactacctaataaagtaactaggaataattgccagaatgtcattcgaagtgatctcttcttcattgcctttttgatttctgccttttcatcaagtgttgcctctggtattacaatgtcttcaacatctttagccttcatatcattctctgttaatggaattggttgttctcccatatcagccatatatttctcggatggcctaggtaattccttgtagctcgatatactactagtaaatgatcttcttaaaagaccattattaactgtccaacgtctcatcatcatcatcatatcccccgaatactactgtttttgatagaatataccctttaatattagatctatgtaaagaaagttaatcagtctggtatcatgaaaaattaggctttactgaaatttgtcaaatttctcacggtgatttcttcatgaattaattctagtggagagtctacacttctgaggagacttctttttagaaggaattttatcataggtataccagacagattatactagatgtcaatatgttataaataatataaaataaacaataaaaaataacttaaagtatttttaaaaagcatcattgagttgatgttaatggacagtaagttgtgataactttggtaacaccgtcagaaacaatagttgaagtagtttgataggatttcacagtaactggctcatatgatatagatttatgggttaaaatagtttgggtaacaccattagagatactagtaattgtttgttttaattcggggatactagtttctgcacaataattgtaaaaacaagcagttgttggaatataagtatatgcatcacttgaggcaggatctaattgatagatagtaacagcatattctgctaataatggatttggacccataactaaaactgcaaatgaaactggaacaacaccatattttggtaatgctaattgaggtgttaaaaatctgataaatttaccatcatctgcattttttgataatttaccataaaactgatatggtgtatcgtcacccatgtcaagatctgaagaatcaaatggttcacattccgtgtttgatgaacattggtagaagttactaccggaatcactccatgcaaatgtttcgggataattaagttgtaatgttgcaatatagctaaatgatggaaaatttgctggaacatcaatctgaattctgttatctggggtaacagagatctcaaaatcaacacttgcttgtgtaaatggaacgataattgcagtaagtgcagataatgtggtggtaagtttgttaaataacattcgtgtttgcttggtcttcttaatgaattaacatgataactattcaaagtggattgtttatggtttatatagatatcaattcctgctttatatcacattttttgattatttccattccatgtgattcagtaccaatctgaaagcagctagatgagttacaaatcttgattatttatcaaaaaattgcttgattgggaatgcaaaggaattggatgattacatgtcaaggagtgataacacgatttttcatgtttcaaacagccatacattgctgcatcatataactgaaacctataaatttacctgtatcaattgctaaaacaggaattttgtgattgatcttcactttgaaatttgaaaaactaccttcatggacaataaaaaatatagtttatctttaatttatcattttttttaaatatatatatatattatagtgttagatagtgatagcaatctaatttaaagtacaaaaaatattacctaaatgtatatagtataaacaactctgaatatgaaacatcccatataactaattttcttcatcactcagttgaaatctagatggatcaacatcagtgatttcatcgtcttccgtattgtctctatatccagaaggggtatttacattatcatgtgttgcgaaatcatcaaaatcatcatcacgactcgcattgaaatctgattcattccctaagaaatcatcaatttctcttgcatcgtcatcattaagatcaccaaatagtgaatgatcatcatcaaccatatcattgaaaaaagcaccaattgatccaatattttgatattctgatcctgtgtttctatctaaaatggtgctgaacatatttgatgtgacgaaccaacccttagctaacatatggaaactaaaaacaccaaatctaacaatatgattaacaaatttatcaattcgattttcttcaaccaattgtaaattatcaccatcatcaagatgaatttcacccaatcttgtaaaaccaccatttctacgaattcctctttcatagaccaaaactaatgttactgcaaatattaagaatggaataaaaataacccaaaacataacccatccagttaatttggaatgttcagatttactacccggacatggatgtctgtctattttgtctaaaagtaaaccatcctcgcatgtggataatgcaagttttctatatccagtaggttcccaccatccatcaacattttcctttgaacatacttctatagggttgacaggagttaaaccctttaccaatttacaagtaccatcaattgccaactgataattgtaatcacattcataatcttctcttgtacatttacagttattgacaatgactgaacctaattggattggtgatttaccaacaaaacatttactatcagcctttttacgaaggtaacttttttcatgaccaaataaacaactgtctttcaaatttggatgttttggggtgaagaattcaaaatcactatccagtatcttttccttttctgatggtaaattacattgccttggataaatagctgtaaaatctaaagtgaaaatgttgtttaaattcttattgtctttagtaatcaaaatgaactttaatgaatcatcagatgggacagtagcaatatcttcaactaagtaagttgtatcatcagcagtaaattgtttttctacccaactgttaccatagtctaatgaatatttgaatttattagtttgcttatgcgtctcaacaataactaaaatagaaccatgatcaccaaattcccagatataattaccctttgcaatttcaacccatgtaataccagcatcctttgtgaaaaataatgataagttttcatcttcaattggtaataaactggtaccgacattacccaaaccaaacattaaaccaacagcggatccagaggagaaagaatcacgcataggatctaatctttctgtgaaagaatgtaaatgtaaactgcatcctttacaattgatattgttaccattagaatctttactaggcggtggtaacaatgaccaagttgcaccatcattatgtgaaatgtgagaaacaagtttcttatcatctttctcaattggattaatcaagacgttagtaatgatcaatccttccaagttttgtgaatattcaaaatcgacaaatgcttctctatttctattaacaaaatctgataatgtggtcaatagagtaccattgtaattggctttcaatagtgaaccatattcatgattaggggaatcattgacagtcagatgtaagaaaagttcgtttgaattaacatctaaaatagtgtaagcagtttgagcatttaagttagtttcagctgggaacttcatttcagcataattttggccatcaacagtaacgtaagcaattaatgattgatcatcattattatcattcaatgtagcaacaactaaatattgatcaccggtcatagcaaaacctataattttttcaaaatgaacaattggctctgaattgaaagaatcggaagatgaaattaatctatagtatggttgatctggaactttttgtgaacaaataatttgcaatgggttgacttcactggataattcagcattgaaaatactttcagcaaaaacacaattaacaacatctgatattaaatcgttgaatgtttcaccattatcttctgtgacagatgcatatgatttacaattgttggcagaatcgcaatcaacgtttgaaaccaagatgtacgtatcccttgatgatttatcaaaattcatactatatgaactataaccctttgaaacatgtggtaattttgcttctttaatgagttttcctctattagtagatgtaaaaatttcaccgctatcagatatcaaataaaatgaatcaggaaagtatggattagtaaaaatgtaaataaagttttcatcagctaataagttgaaactcagagagtcaaatgaaatgtatgcctttcttgaagcagtcaggacaattagagtttcatcttggagttctgaactagttgcattttgttcaagatattgatagtatagaatgttttcaccaaatgaattaaattcaatactgaccttactatcatccgatagatctatatctttacatttcaaaacataatcatcaacaggaggcttaaaaccaccttggcaaatattaccttctgggattatggtctttgacaatttcatttcttttaggtttggatcatcaatacaataagtttgtaatacattcaaatctggttgacactctttattttcatcaagattaaaaccaaaattacattcttcatcttcctttgtacaagcacatggtgtttcgattacttcaatatccctgaaatttctatttacaaaacaatcagcatttgcctttcttctactgaatttctctgaatggccaaaaatacagctttgttcatttgtcacaggattagccctagctaaccattcttccatatcattatctgagcaagttctatcataagtttcagaaaaatcaattgtgtataaaatggaattttgctcaggctgatcgggattttctttccaaataccatttaaaatgaaaactttatcagtgttatctatattattaacaaaaaacaaaggaataaaatgatcgtctaatttaaattcattccaactttcaccttgatctaaggaatatgaaaaggaatcagtagcatgttctaatttacctgttaaaaagtactccaaatcaacatcagctgtaactaaaatattaccaatatcgccaaaagcaaaaactgtaggcttatcattaatttttttccaagtaacacccccatctcttgaaagaaaagttttcaaattatcaactgaatgatcaaggtatttaccaacattacctacacctaataaaataccaggggtactacctgttgataaaagaccatcaccacgacgttgtgtaacccaagcaatatgtaatgaacaatcatcatcatttaagcaatttggagagtctgtgatatttaaatattgccaatttttaccgtcatctaaagtaatcattgattttgagtcaggtaattgcatattattgtaaacaacattatgtgatgcaatccaaacaccatccaatgtctctactttggatattaaagacataccgaagagattagaaaaaacatcatcgaataattttttaaaatagacaccattagagtcagatttataaactgaagatgaagcttcaacattaagagatggtgattttgacttatgattgtaaactgagatataaaggttattctgtggtgagtctaaaatactgaacatataacctctactattaccttcttggccatcaagttttgccttttcaaagtgtataccatcgattgaagtgtataatagtacggaatgtctcattcttgaatttgtggttactatcacagtgataaatgaattgaccacttttgttgataaaatatgagcattaccacccatggaagatattgataattctttatgtgatttaaagaaatcatcagtggatataagttgatcagaattaatagcaccaaaataatttttttgatgtgttatacaaataattgtttcatccttagcatttttaaaatagggattggattttaaaaaattacaattaccagtgtttggtaatggcatttcaacaagattcgattttaaattatcagttgaatagaatgtcttttgaaataagtgatggattttctgtatcaataatttcatattcgaataaccaataattcgtgttagcaaaattgatttgagctgaagcagaaacaaccatatttttagtatccgatgtagttatatcaacatcaaaatgattccaattggatccactatcagttgtataaaatgttctacctgttacagtgaatacaacagcaaaagttttgaaatcttgaaattcctgtaataaaacaatatctaaatcattaccgctatcatccttaaaaggcaattgttcccaatcagcaccgttgtttttagatagatatatagatgaagatgaacgtaacatcacagtatttgaatcattaaattgtaagatattatgaataaatggaaatttggagatagttatctttggaggggttatatccgctgtcaatgcagggactatccaacatatcaagcaaataaatgtcgatacaagctgcaatatacgcatgattgtgtgtgttattaacagaatgtaaagcttcgataatcaagtaacataaatctcggtattatttagccatctcaacaggatggtaatgtcatttatctttaattatagtggtgattattatagtagtgagcacgtcgatgcgtctgattcttgtattatatagttgcagttcatgttcgtacaacttgtatctgaatatacagggctatctaatagtagtataatgatatatgtattacagtactatacatgtcatcatctattcattgattgaaaacagtgatacaaactaattgatacaacctatgctaaaggtataaaaagaagaaaatatttatggcggctcatcagtttattaccttcttcttcttcttcttttgcttctcattatactataccgtatatactaccagcaatccattttcattaccagtatattatcaatatataactgatagaatggtacttcaatttcatttatctttaagagggtacataattttaagaataatacttcaattgattagtacagagagataagcacttgacgccaataaatgtatttcactagttgctaggccagaaagaaaaaggcttgtatcagaacttataatctttaaaattgcttcgtttggtgaccatgtaaggatatcagagtctacaacagctgcaagacccatagttccatgtgatgcagtcaatgaagtctgtaatttcaacaataattcagaagcagagtctgtagagtgccccagacgcaaatagaatgacattatcttttaaagagttcaatgatttaatgaaagaacaacttaaagttaacaattaatgttaagaaaagtgaaatttttttactgtggaagattacgtaataatttgccggtgtttgcaataatattatttatacctgctatgactgatgtgaaatttcaattgtattctgttgattataaacacaatcttttagttgtttacattgttatatcaccagacattccgcaatggccgacacatctaacatggattctgaagtgccatctacaccagctacaccttctttatctgcagagtctgttccaagtactacagcaactcaatccgttcctgcatccgctcaagcttctggaataacaacatccgctgcatctacaactgcaaccgcaactgcaacttctggtggtagagatcattctaaaactgttatttatgtttcaggcatcccttcatcaattgctgaacctgaagcgcatgatcattttgtctcaacttccccatctactccaattaaatcatttaaaattcttcatgataaaaacagacctggtttcttatatgcatttgtcgaattttcaaaccctgaagatgccgcaactgcattaccattattcactaatacaacattaggtggatttactctcaatgtctcaatggctttccatactcaacaatattcctcttctaacaattcaaatggtgaagatggttcaaattcagatagtggtaatcaatcacctgttttcaatcttttcattggtgatttatccctggaaatcaatgatgattctttaaactccgctttttcatcattcccatctctaattcacgctaatgttatgtgggatatgaaaacaggtagatctagaggttacggttttgtatcatttagtgatcgccttgatgctgaaaatgccttaaataaaatgaatggtattactttaggtgatagacctattagattaaattgggcatcacataaggaaaagaatcgatcaaacaatcattcaaataattttggctctttcaatcaaaataatagccaatacaacaatcaatttaacaataatcgtttcaataatcaatttaataacaatggtaacaataatagcaataatggtatgaataataataataataataataataacaataattacaaccaatataataagttaaatacccctgtcatgaacggacaatctccacttcaatctcctaataattcatttgatatcgttgttaggcagactcctaattggctttccgttgtctatttgggtaatttatcagaatacacttctcaaaacgatttgataccattattacaaaattttggatttatcgttaacttcaaacttatcagtgaaaagaactgtgcatttgttacctatgatactcacgaacgtgccgcacttgcaattgttcaattgtcgggattatcaattaatggaagaccattaaaatgtggatggggtaaatcaaacagaaattttgttaaccgtaataaccaacaattgccaaaccaaaatcaaaaccaaccacaatttcaacaacaacaacaacaaaatcatcaccaacaacaagctccacaacaacaacagcaacaacaacaagccccacaacctcaagcaattcaacaatttacccaaccatttaatcaatttaatcaacaattccctcaagcattcaatcaatcctttaaccaaccatttgctcaatccaacatgcaagatctttaattgatttttaacattaaaataaaagaaaacgtttatttttcatctgcattatttgctaatagatttatttcgtacaatacatgttttgtttcctttaattatttatcttcattattcaacatttattttttattatcatttattttcaattatatatttctatatcatttatctacacattttatatatttattcttatttatttaatttaataacgtaaattgatttcatttttttgtaggatattgatcaaaatctatgctctattgtaaggttaatgttacgcgtaaagttctgcatgatttcgatgaattttgatttgaattcttaattccatgtcaaattggtatcaatacttcttttctttggcaaagatgagtggatacaatgatgttgggttctcaagaaatcatttcacccctcattatagcactccttacaaagtcgagcgtgttaccatccatttgaaagaattaaataccactgcaacaatatatccaatttttaacataaattcaattccatcaaatttattgaagtttttgcatcaagaatataatgatgaagtgaacagaggtgataccttaccattctttgatcaattgtcactggaagaatttcaaaattattggtgtgccaattttatagcaataatgtgtattggtgatgaacccactttaaatgctgatgaagaatttactactaatgattgggcaaagaattgtttgggtacgtttttcattaaatcagcttacccaggtagatgtgctcatatatgtaccaccaactttttagtgaatgctggtatcagaagacatcgaataggattttacctatgtgaatgtttcctaagatgggcaccgattttaggatacagccggtgtattattgaattagttttcgaaacaaacataggagctaaaaaattacttgagaaatgtggatttaacaaggtagggaagatcaatgcttgtgcaatcttaaaatcaacaaaagatttgctgataaattcattgatttatactaaagatttaccgattataaacgacgatttgaatgtttccaaacatgcaaatattttagtttatttattatctgggaaatatccagaaaattctactagagatgatcgaagtcgattaagagcattggcttatcactacaatgttgtggataataaattgttcttgaaagataaacaggttatatttgaccctaatgatcaaataagtataacaaagaagatacacgaagaaaaccatatgggtattaaccgaactacgaagaaactatcgagtagttactactggagtaaaataaaacaaacagttaagaaggttgttgatgaatgtgaagtttgtaaaaaggacaaatcttcagaatctgcaaatcaaatcccacagaataatacttctatcaccaaccatgataatgataataataacaccactactagagataatacaattgctactaataatgaaattactcaaaataatagtaacaaacgtcaaaaagttaactctaatcaatttgacataccaatgctatccaatcaatggaatcaatcaccagaaaatgctaaaagtgcaaccagaatggataccatgagaatagaaacaccagatgatttgttaagacagtcagaaactgccattatgaatttaatcaatatcaacaatagccaatcatcagaattacaacctcgtgcaaataaaactccaaatgatgatacaaccgatcttgcttcaatgttaaattattataactctacaaatccttcacaattaacttcatcgtcacagaaaagaacacgaaatgaatttgagaaaaacagctatagcaataatctattttataatcaatttcaaatggtacaagatgatgaagaggatgatggtgattacaatggcgaagatgatgatgacgaagaggatgatgaagatgacgatgaagacgaggacgatcaagcagaagaagttcctgaagacgaatctatgttaagctaatatacatataataaaaattctatttaaaagaagagttgattagattatcaaactttaattcaccctcaaaaattgccattactatgacatcccatttaacaataacataatttacgtccatatcaacacatttggcgataaagtgatcttgtaattttgtttcattttcattgctaattaaaatagctacttctttacttccactgatttctttttcagtattaacagtcatggttttactattttctttaaaattactgaaagatttgcatccaaatgattttaaaattagctttaaagtatcaaagccaccggctaaccccgatgataaattgaatgaataacctttgaataaacttgatttactcttcttcatcaatttcattgcttcaaattttgtaatatttttatgaaaaatatttttaggttttatatctttttcataatcaataccattccagatatcatatctttctactttaggtgcaattgcttcaaattcactcgtacttttagtgctatctaaggttccaagaacatcattcaaaaatatcggttcaagaaaatactcaggatcaaatgataaggatgtcagaaatttctgagtacgtagtaaacttggtgctataatacaattcaggttcttatttgcattttcaatgattgtaataccaacttttttcaattctctcttatcgccagctgacaatgatccatcaaacccagttacgatagctgtgatgttatatggttttccattactctttttaggggctggatccgcagcttttttgctatttgatttggtagcatcttcgttagcttcaataacttcaatggtatccgtttttgatttggtcttaaaggaatactttggttttttggtcactagtatggtatcttcttctacttgacgtttctttggattggcttttggtgtactcttgagtttcttctttggttctacttcttctcctatttcttccgttttctcttctgtacttattttatcatctggtatttcccaaacttcatcggctgtttgtttttcagtatctgtaagtgcaattttttcgacttctggagatgtttccttcttctctgttccaatttcaactggtgtgatagtctctattgggttgactattggggtgatcgcttttttggtggttttgttggtttctgagttcacaggtttgactttttcagggtttgccttagaatctacatcttttgaaatctgtgttgtcacatttcctttcttagcctttgaatcctgtggttttagtttcgtcaactttttcctttacggctaagttctcatcgttgttagagttttcaccaaatgttcctagaaattcaacatctccgataattcttatattttcttcagttcttggtaaattactgtagaatgaaacgtccattttcttccaattaacgaagcaatcttcaacccagagatgatttactatactcacattccattttttggaaaaatcatactttttaccaactttcttggatgcaattaaatgagtgtttgttgatttcaaagttttggtaaatttgcttcccattctaagaagtaactcttcaatatataatctcgcatcaccggtataattagatattgctacaattgcttcttccatctctttgtttttcaattttggaacaggataaaacagcaaggagtttggaagatcatcacttttgtaaaaaaacaaattaaacaaaaagtcgaatgttctctgtttaattttagtatgtttttctaaaaaccttgataacacaattgtctcaaattcagatgagttatctccagttttgatccaacttaaacattcgaccattgatgaagatatatgcagatttttagaaaattcaaaattaaatttaggtagatactgatcagcaggatcagataaaatattattacgcttgatatcgtctgtaacttcgtagactttttcaggaagtaacttaccagcacgcaaacaatcaaaaacccagtctggtctcactatatgaatatgtgttccattcacattaactttgttaaatgcattgaccagcctaacactatcagtatctgatttatttgtcaccaaatgtgtcagagatttcttcaaatcggcaatataactaccaccaaaaacagtaacagcaactttaacaatttcaaaatcatcttcatttcctaaatcttgagagctaatagtgaaatctttaaagatatgtcttggatctggtgagaatggtctaattggcacgacgtgtttattctttataaccgttcgtagccataatttggaaacaactggaatcattaattttctagttataacttcatattgtggaaattcaattctatctgaaatcacatgtgtaaattgtgaaagtttttgaggactcaattcgttgatttgttcataatcgaatatctggaatacttcatcaatgtttaaacttataagtgaatcaaaagctgttttcaaatcggaataagacttttccgttccaggaccttcatttggatgttttactaccaatagatttatatcttccagtatcgggaagctgggcattgtgttgttacagatcggtcagtaatcagagaaacacgaactggaatgaagggtgtataaaaacaaaaatttgaaattccgcctaagtaaacaaattttaaataattttttaattgttttacttgaaatttcctttcttctcccggagacaacatattattggtagaaactctcaccaaaaagaatgtcgaataacagtaaacgacagtttgaagaggaaaatgacgatgataatgatattgatgatggttcaatattaggaaatgaaaaaaagaaacagtttacagcatctagtttactaaaatctgcatatgagacaagtcaaaaccaacttcaagtaactgattataaaatagcagatctagaagaacttctgttttttcagcgacgtaaacgtactgaatatgaaaatgctttacgacgtaatagattcaattatggacaatggatgcgttatgcccaatttgaaattgatcaaaaagatttaagaagagctagatcagtctttgaacgtgcattggaagtcgattataaaaatgttacaatgtgggtgcgttatatacaatctgaaattaaaagcaagaatatcaatcatgcaagaaatttacttgaaagagctaccaaacttttacctcgtattgataagttgtggtatatgtatttaacaattgaagaatctataggaaatgtcataccagtgagtgaaatttatgaaaagtggttacaatggaaaccaattaaggatgtttggtttcactatgttgaatttttagaacgatataaagagtatagtaaggagagattgttatttgaaaagttagtggtagtgtacaatgattatgattcatggctaagatgggtggaatttgagaaaaaatacggcgacttatatcaatgttttgaatgtttataaactaggtgtgaactctctatatgagaaacgaaaattatgttccaagtttttgatatcatggataaagtatgaattttataacaaaaaatacgaaaaggtgaaaaaaactttatgaatttggatttcagtgtcttgatcctgaagaaaataaacttctacaaaagtttcaagttgattttgaaaaacagtatggtgtaaatagtgaaaacatcgaaagcttaggttttgacaaaacgtaaactcaaatacgaagaacaattacaatctaatccttcagattatgagacatggtggacttatctcaacttattactagactctgaacttgaaatttcaaaagaagatatagaaaaatcttttgaatctgcaatatctgttatacctgattctattttttttcaaataactggaccacatattggtacctgaactataggtttgcattatggctggaatttgacaacaagaacattgaagcagctactcttatctatgaaaattttaagagaattgtaccgcattcagtattcaccattgttgatttctggtacaagtattctgaatttaaactgagaaattttggattggatgaaatgcgtatgatattaggacagagtattggacttacatcaaacgaggaaattatgctatactatattaatatggagattaaacttaaatattttgaacgagctagaaaattgtataataaattgattgaagttcactctagtaattggaaacattggttaacatattttgaatttgaggattcattgggtaatgatgatagaagctatagtatagttgatgttgcaatcttcaacgagtttttaaataataaaagtaaaataaaattgataaattctgttatgaacaaattaattgaaggatacaatttcacgttggccaagaaactttcagattataagattgaacttactgaatattcaaatgtgaattacataattcaaaggtgtctattagaactacgtataccaagtgaagatcaaattacaaagattgaaaaggaagaaataacagagatagacattaacgacaatattaaaaataatactagggatcaatactcaaagtacatatcactaatgaaagataagggctaaagttcaaaatagaattgttcttttagaatcattgaagaattttgaagaaaaacacggtaatgctgaatcaatcaaggctgtacagatgatattaccgaagatgattcgtaaatttaaagaagaggaaagtggacttaaagaggaatatatcgagtatgtatttcctgatgatgaaagagagattgaagagcaaattgatgattttaagaatgattttattactgcattgggagaagatgatgatgacgaaaatgatggagaaggtgaaagcaaggctgaaatagatgacgaggagaacgatgatgaaaatgatgacgaggttagtgaagatgatgttgatgataatgaatctaaaaaaaagtcattcaaatccagatttgagtctgacactgaagaggaagaggaagaaggagttggagaagaaacacaaccagtaaaaaaaagtttttccagcagatttgaagaatagacattaattttatagaaataaatacataacataatacatacaatcattaattaatcataattttggtttttccaacaatttattacgcaaaacattagggtaagcatcatatgtattaaagttacccatatgccaaaatccaccatctactatcataacagtaccagtaatccattctgctgcatcactgaatagaaatacagttgcatttccaatatcacttgttctaccaactctttgtaatggtattttagattcgaaattttccttattaggtactaatttgctaaaaccttcagtaccaccaattggaccaggagcaatacagttacaacgaacaccaattggaccaaactcaacggctaatgcattagataaagcgtcaattcctgccttagcagctccaacatgactttggaatggtacaccgtaataatgaagagttgcagaaacaaaaattacacttcccttattcttaattaattgagggtaacaagctttaactgtattgaaagagcctaataaatcaatatcaactactgttttgaaagcgttagcagacatatgattaaagtctgacataaaattaccagctgcaccacaaataacataatcaatcttacctaatttttctacagttttgtcagcaactgataccattgaatcaatgcttcgaacatcacaaccacctaatcctattacttttgcatttttattacctatcttgcctaacaatttgacaacttcatcgacttgtttctgatctctgcctataatacttactgaacacccaagcttcattaatgcagcagcctgttgcctacatattgttcctgacccaccagttatcaaacacactttcccatcaaaaatcccttccttccacacgttattgtaattataattttccattgttaattgattatgatacaagaataagaaacaaaccaatactgaacaacatatcctgaacaaacagacacaacaccatccttttataccaccaaaccgtgtttttaatgtatgacataaaatcggagttgatgaaaatattttagccgagccccgcatattgatttttctatgatcgattattcccacattttatcactatgtagccctcttcttgggctcagagatgagtggtggtgtatccgtatcatccagtacatcttctataggtctcttctgtatcttggattcttcactttcattgccattgccattaccggtattatgtgatataacaactgtatcatcatcaatatcgtatgaatctctattctgaataacatctatcaaactcataccaacttccgtatcagctaatgtatctttaaaattctcaataaagtattctgcaataagtttcatattcttttcatcaacttcatcgtttatcttttctactatattttgtagaagaccttcacattgtgaacttattaaattgtctatatctttcagtgattgtaaaagtttgaaaaatccattaaatatatcattttctattatgtaatgagtgtaaaaatcatcatttgataaaacaacacttttcaaacatttaattgagtttagttgtagtttacgcttaaactttctatctaaatttaatattattctattaactgattttagtaaatgattctctaaaatgaaggaccgactgtatattggatcgtgagttttagaaataaaatcaagtaaactgataatattttctaatataaatgattgattccaatcaattttttcagcttcagtttcgttatttatgttaattaatggactaaacagtttctttgctggatcctcataaaacttaaccaaaaaaatatcatcaatttcatctgtttcaatctcactctctctcatattcataggatcaattaatatcttaatagcttcaaatgattgtgatttcaatattatattatcatcctttaggaaaatgtttataagtatattaagtaaattttgattaaaatttttgaaaagtagtatatcatgttcaacaataattataattagttcagtgataagtaatctaatcttaattttagtactatctgttgcgttttttattgaatattcaattaattcaattaatcccttggatattaaaagtgtataaaatgaagttctttgaaaattttgtacaaactttgaaatcgttataattctatgaagtaattttatatgttgaaatatctttaaattgctatcattctctgtgtctatgtctatatctgtctctgcatcttctgcatctttatctgatttagtttcaagttttgtttctatatttttgtgatttttttcattcaccgtaattggtttgatttgaaatattggatctaaactttctggatgatcttctaaatagttaattattttcaattcagaaatatttatcagtgtatttatacaattaatatttgtttcatctaacactttaactaaaactgtattttttaaaaagctaaatgataaatatttgaaaacatcagttttaaactcattattttctttatcaatttcaaataaatcagtagttttcataatttcaattgattcttcataactcttctcccaattagatctccaactgagtttatatccttgtaattctggatcaaattctaatatacctaatatcttaacaaaaatttcattatttttaacaaataaattccaaagatcaatttcattaaaatatatcaaagatttaataatatcatttaaaatatagagcatattaaaagacttggaagattcaaataatccaaataactttacatatttcatctaaccaaacagcattattctctaaaattttaacaattattctacctctaaattctttgattgataataaatctaaaataccattcattacattaatatcatcacatggtgaagctaattctggcataggacctgctataagttcagtagtttcaccatttgaggtttgaataattgcaattaatgaaattttacttgaaatttcacaattttcttgtatgttaattaaaaatgcacaaatttctaaacaaccttcaggttcttgaaatgataatgcataatcaactccgtcattatttgtccaaacaattaatgtatcctgttgtctttgatattgtgtatttcctattattggagaatttaataatactttatcgggttctgattcatcaacaactttaaaatgaggatttggaacaaaatgtcctgaacagtaacctgtaccgcaatcaacccatttatcatcagacagttgatatagtttaaccctccgttgaacagtgggttcactcattggcttttaagtaaataatgatatatctgaaaggtgtaactattgtgtttgacctctaaagtcaataatggaatttcacgaaattgaaattttgagatggatccacgttatcaaaatttcagtctttgttctttcagcttttatagaacgttacattactgtaaaggtttatcttagttaatgttagaaaattgaaagcggaatattaaaagatgttatgcatgtactatattttatataatgtaaatggacaatatgaagagaaacaaaaaaaattaaatacgataatatagtatatagtagtagtagtagtcataataagggaatataatcatgtacttagaatttactattattcaagacttctggagtagtaacaggccattgataattttcattagaagcataatcataaccatgttttttcataaattcatgcaatccttcaggacctcttgaaccgtaaggatataattctggagatgggcctttatcactttcaaggtaatgtaataatggagtaaataatgcccaactaatatctaattcatcatttctaacaaaatttgaatgatcatcatttaatgcatcatatattaatgattcataagcttcaggtatataaaattcttttgaataacgatctttataagttaaatcaagatctgaaactgaaactttatttggaacacctggtaatttaatattcattttaagatacattgcttcatctggttgaattctgaaaactaattcatttcttgaagaattttcataaatatctgcaactgattttttaaattgaattctaatttcaactttactatcattcagtgctttacctgcctttaatataattgggacatttttccaagtatcattatcaacatgtaatgcaattgcagcaaatgtatttgcctttgaatctgcattaacagtttcatcatctatataagcaggttttgaaccatcagttgatttagtatattgaccaattaaaacatcattgaaatcaattgtacgaattgcctttaataaattaactttttcatttctaatactttcaggatttgtaaaatcttctggttttcccattaataaaatagtgagaacttgtaaaagatgattttgaataacatctctgattataccaattgaatcgaaatatccaccacgaccttcagtaccaaagttttctttaaaagatatttgaatacaatcaataaattgattattccaacatgacataaggaaagtatttgtgaatctaacaggtaataaatttttaaccatttctttacctaaataatgatcaattctaaataactcttcttctttccataaaggagagagttcactttgtaattgacgagaactttctaaatcatgaccaaaaggtttttcaacaattaatcttgcagaaccctttgaactatctgaagggtaattatattttttcaaatttgttgcaactttagtgaaaactgatggaggtaatgctaaataatataatctattagatacttcaagtttattatcattgtcgaattttacaatagatttctctaattcttggaaaccttcagcttcatcataacttcccctatgataggtacaaatttttaagaaattttcaagttttttaatatgatcatcattatttttatcatattttaaatgttttgaaactttatccctgaattgatcatgagataaatcagaacgagcaaatccaataatggagactacttttggtaatttattttctctatataaaccaaataatgcaggaaaggttttcttacttgctaaatcaccggaagcaccaaaaacgacaattaaagcgttatcgtgaaaggacatttttgtttatgtatgaattgaaaagaaagtgaatataattaatttaccaattgtaagatgaaagtgaaggattggttaaattatattcaatattttagattaataatgaaattctaatctagctaagacagggtcagactagtccggaaaaacatagtaaattttaaattttcatataaacgtcaaaaagtggaaaagtggaaaattatacttaaagagactaatactattagttattactagtaattacataatagaaattttttttgctttgaacatgtcccaaaacagcaattcctcaaaggccgtatatgagtatgattcattatattaatatgttactgtttgattattaatcacttaacacagtctttaccacgtagagaacacatctgggagtactggtgtactacttgtattgcctctctttctctcattggccgtctcaatcgtattgattccaattgatttcgcaaatttaatcatcaattccccagagttcttcttctcttcattacttttcaatccctctaacatctctttattaggtaattgtcctcctccattgagacaacctccaggacatgccataacttctgccatatcccattgagttaatgaaataactccatcagtactagtactattacttttacctctaacacctcttcttttacgttctgtacctttccattttctcacaccgttttgaatatttttaaatccgttaactatacctgctctcgaaataacagttccatcctttttaacggcttgaatttcaataatatcttcatttttaccattaataacattaattgtacattctccttcttcttctcctttttcaccttcttttttacaaactttttcaatgtatgataatgcccatccaccactttttaatgcaggtggtaaattgttatcagtaataatacctccccagccgtaattatcaaattcgggccattgtggcggtgcatactccacataatcaaatgattcatcactattttgataaaattcaatatcacttaaatcaactaaacttatcaactctcttggtgtaacgacaaaatcaacaacatcatcacgactagcttctaattttttatcaaaacatggcattaatgataatacacatattttagcatctgatctctctttctttataacttcacgagctaatgcacctgtaatccattgaggtgttttaacttcacttaaatgttcaactaaatccccgtgtgttttttcaacgtataatctccatccgggacaaacacttgtcaaaactggtactttaccaccttttttattattaacttcttcaaataatttataatgtccaatctctcgtccaataccaacaccaacaaaatatgtaatttgaaacctttttttcatacttttaattattatttcatctatttctttaacacttttattaaattctttacttaatgaaattctactttgatcagataccatcataacataaatcatattatcatttggtttattttcttcccagtattcaacaaacttgctactatcatgttgtttgattaatatttcttcacttgatgttatacacccactacatgcaagacaatcttccaatgatatactaacttgagttttctcttcaattattttttgatctttattttcatcatcttcaatctctaactgtattactgcctcttccgatgttttaatacatgcaacactagggtttaataaaatcattcaaatcgtcattacctagcatagaagtcataatgtctttgtctactgaatgaaagatgaaaaagatcagattgattattaatttgaactttttcattcgatcaaagttctttgtcagatttgaaattttcttttcgcttaagtttcccctttggggtaatctttttgtgcttatctctgaggtgacgtatactttctttacaagaggtagttgatttactttatcagttaagaattaagcttatttatataattaaatagtttagaaaagagaatataaatgaaaacatagattaacaacatcctgagccagtagtagattcacaacatttttcacattgacaattgtcttcacacttacaatcacatttacaatcgtgtgattgacatttagcacatttagtagattttggagcacaacatcctgaacctgtagtagattcacagcatttttcacattgacaattgtcttcacacttacaatcacatttacaatcgtgtgattgacatttagcacatttagtagattttggagcacagcatcctgagccagtagtagattcacagcatttttcacattgacaattgtcttcacacttacaatcacatttacaatcgtgtgattgacatttagcacatttagtagattttggagcacaacatcctgaacctgtagtagattcacagcatttttcacattgacagttatcctcacatttacattcgcattcacatttgtttaatgtacacttagtgcattttgtggaagcagcattagtattagtatttgagcagcaagacatatttatttaattgattttgattgataaaagataaagatatatatacacttaagacaaattaagcttaaaaataggagaataatgccctttatttatagtcttcaaaatgagtgaacgatttgagtgaaaattgcgttgaaaaaatattttttcctggagaacaatagaaaagtggatgaccaagccgccaactattgatatacaatctgcgttctttttgccaaacatcgatacagatgttcttaaaggttctaataatggcttagaatgtattcttttacttaatgattgaatagtatatcataacatatcaaatttatacactgaaattatcaagttcgaattgactctggccatcagagtgatctaaagtattaatatcatcataggcactattattagtcttgctagtttcagtaagttttaaataaaatctcaacaacgctaatatccataattgtaatatcattgccgcacttgtaattgttaatatataggatgaatgatcagctccaagattaacaactaattgcatttgttcctcatttgcacccataaataaaataccagataaaattaatgcaaatggtgttaaatattgaaaactacgaatttctccatcaatactttcatctttatcatccaataagaatgaaatttcaacaattctagctaatccaccaaacattaaaacatatccaaaaaatgcatgaactttggtactaataattaattcttgaacatgtcctgacattgcataacctgttaaaatcatcgttaatgcaggcataaaatttctctttctattaatagataaaaacatacctaaaagaccagctgcccaaaatataatacccattgatgtatgttgataatcaccatgagaccatggttcccatggtcgatgttcagtaaatgtatttataacaccccaaaccattataactgttgaatcgtacatttcttgtgaatatttacccttatttactcttagccatggaacaaccaaaactactgataataatacaccatatactataaagctcatacccataataccatgtgcattacattgacctgtatgatcatcataacagaattcaagcattgaaacaacaccagcactcaatctaataacaccacataatacaattaaacatgataatactttatatgtaactgatataactttattactattattagtcttactattgtaaaatccaataattaaaactgttagataaaaaaatatcaaaaagatacctgtaccatgacacattttattttcatgaccaaagtaatcacgatacccccaaattgaatcaattattgagtatacaaatgatattgtttgaataataagacttcttctgttgtaactattgattaatgaataaacactaccaatcgatgaaaatataactagtattgcaagggaaagtaaccaatgaatacattttaaaaaccaatccgcatggaaatgttccttttgtgcattagctatagctgatggtaagtccatctccatcttgtattagatctatagttgttttatggaatgaaataacgtagttatggattataaatccgtggaacttagaacagaaaattggtaacatgaaaatcaattatatcacgcaataatgtaacacggtcttgattcttttttaacttgattgttataaaaaatatttggttacaaacttatacatatctcatatagatgataaagctacaattaatttttttttcgacgaaatccaaatatgctgtttcgacgtccgcctgttgcatcttcttgatctccggaattgaatggattaataagactttcatcttcgattgattctaaaacatccttttgaacgaacggtgttggatgaactggggaaaactgtctagtaaaaggatttataggtgacatctctggcattctatccttaggttcagatttctccccttcttctacacttgtagtatgttgtgattgtaaatcattaatattggtgtcattaaaagaaaaactatggtcctccgttgaaatgttaaaagttgtatcatattcattttctatatcaccattttcttcttctgattcctcctcgatttcatcatcgcccaattcatcatcttcatcttcttcatcctcattcagaatgtcaagttgttttctcatatattcttcttcatcttcaacctctctgtagaacaatagataagcagtagataatccaacaccatcaccaaagaatttaaagacataattttcattaatcttctctacagtttcatcatcaaataacaaccaaccataatgttcagtcttcactaatgagacataatgtccatgatatggaccacccccaatatgaacaacaacaccatataattcgtataatttatcaggtttatcactatcattagttgtattacatattcttaagtttttaacatattcaacacggtaaaacagtttaactaatcttcctagtttttcggaatacttgaatctctttaaatgaaatgtgagaatctttggtgtcttcttaattttaacagatttagcagcttcttgatatgaaaagcaattttcacaatagaatttattgttctcatttagtaattcaattttagaaaatatttttaaacaatttgtaatagaagaatcaggttccagatcaatggataaatctaagaatttttcatctctatatgaagaagtatcgcatgttaaacattttgtttctgatgtaacctcaccttcaaatgtatcagatataatcttttcattgtttaaaagtttaacattttccagtatattattaatcaggaaatttaaaaattcatgagcatcttgatgttgtgcatttctgaacattatattttcacgtttaataacttcaattaaattaaatggtgttagaacacctgtgttagaataattttctgcaatacattcaaatgcatccttaataactgtaaacatattttcattttccattccatattgtaaattaaaaccttcatccaaattaattattgggcctctaattagagctgccttctttctccattctaataatgcatttgtatctttgattattccaacaacagtaagatttctttgagagtttctgtagtagttaagttcaagattcttaaatgcggggtatcttttagttatttttctttcaagtgcttcatcttgctgtttaggattaattccgaaatcactttggatataagtaatatcgtcattatcatttgatgaattatgattattttcattatcatttgagttcccgttattgtttactgttccaacagtggtagtgcttgaattatcagtatttgatctactaaacaattttctaacggagttcccattaccattagagcttgaagatgatgttggtatcggtggtatatgatgtgatgcttgatcattattcaaattggagttggtattagaatgtgtattgttatttaaagatgagatacaatgtggaatggtgtttttgtttcttccttccacgttaaattttctaggtcgttgattattctgattattttcatcccttgttgggaattgtagtattgcctctctaaattgtttagtgtggtataaacattggaaaatagatgaaacgtaacaattgtaaccgtaattttcgataccgaaaagcttctctgaaccatctccatatggtaagtttttgttatgtttattaattacagtattagctaatttttcagactgttcatttgtgaatttcggtttcatcaactcaatcttaggttgtttttgttccttaatattcccgtaaacttttaagttattgttagaatcaatcgatgattgtgaatagttttgagccacaaaagatttcgatagtggggtctttggtttttgcgagttattttgatattgagattcccttatattggaattatgagactctattgaaatatttgaagtggtatccccatcaggtttataatcaacacttggtgcaacggaattagcggaaccggacctttgctcattggattgtttcactgttcgaagagtattgaggcgttcattattatttttcaagtcctttgaatccttcgatgtgtctttacccctatccttatctctggataatgactttgacttcaatcgtttaagcatatatggattgttgaattaaaagagtgtaaatagttaaataaccggtacaatatacaccaaacagaatgtgaaaagcaacaacagtaattaaaagataaagagtgacaagtgccagcttccacgttaaattttagatttagtatcaaaatctcgaaattctgttatttttccatttattctgtgatggtctttgtctactgaaattttagtttttgattgtaatggaaggtttaaatttacatactttaaacttcacttatttccttctttaatcaaataaaagacattgcttgctctaattaagacgatatatccccatgtcacatccatatagagtgcatttaccggtgaattccgtggagaagggtggaaactgtggcaaaaacgacactatagctgatccaattaagccccatcaggttttggcaaatcatcaactacagacaaggacaaaaaaggcacatccttttttacaacagttgccaaatgatgtttcaaaatcattagaatcattgcatttatcatctcctcaaagaaaatattttgatcttcataatgatcaaaccccttctccgagaggtagtacaacttctagtagtccagtacattcattagattcaattaatactcaatctcagaaatctcaaaaatcacatcaatctaaaagttgtaatagatcaaatagatcaaaggttgtcgataacgaatatgattctgaatcggaaataaggggttatcaaataaaacgtggtagcaataagaaaccttcattataccaatcacaaacgagtaagattaatagtatccgacagatgatgattagtgatacagtaaaagacacgcacagtcataaacaaaagtctaatggattgtctattattgatcatgtggaagctgaagaagataatagcactgaatatgatgaagatattaatagtagtaataataacacaacaaataatacaattactactgataaatcatttgatatcgatgattatgcaaatttaagttctcatgatgaaataaaagtacctgaagctgaagaattgaatgattccagtttcagtgataatttataccaattaaatgaaaagacaaaatcagttgcaaatctcatccaccctgtttataaagataccacaccaattgatgaagagccaactgataataatacaaaagtagcaataagtcctgtgaaatatgataatgataccagtaaatccaactttccaaatgatacaactactacacaacaaattaatgttcttccattggataaatcaattgaaatgtatagacaaaatgctaaaaaaactaaaaatccagaagttttattttcatttgcacaaatgttaattagaactgcgatttcaaagagagatgatatttcgttaacaaaatctgaaaaggaatcttatcttcacgaagcatataatgcattgaaaaaatctagtaaaatgggatatattgaagcacaatattatttaggtgatgcattttccgttggtttattcaataagggtaaacctgaactgggtaaatcactttcatattttgaaattgcaggtaaagcaagacatgctgaaagtgcatatagaactgcaatgtgttacaaaaaaggttggggatgtaccagagatgcaagaaaagttgtaaaatatttagagattgcagcaatgaataatcatccagttgcaatgatggaatatggtatttatgcatttcatggtttaatgagtttccctgaagatattaacactaaaaagaaaggtattagttggttaagacgtgctacagaatgtgcaacagaattaagttgtggtgctccatacgaaatggctttgatttatatcaatggattcaaagatattgttattaaagatacaaattatgctattaaattattatttaaagcatctaatttaggtcattcaaaatcatcttcattgttaggtaaattttatgaagttggagatattgttgaacaaaatgctgatttatcaattcatttttataatataagtgcaaaccagggtgatgttgatggtatcttaggtttatgttcatggtattttgttggtagtccaaatttaccacaagattatgatgaagcatttgcatgggcattaagggcagctgagatacatcacaatgttaaggcaatgttattaatggaaagattttatcaaattggtgttggttgtgagaaaaatttagaaaaatctaaatattggggtgatttagctaagaaaactcaggataaagataataaaaataataaatataagctgaagattaagataaaatgagttagtaaagaatactgtaatgatttttttttacaattataataaaaagtttataaaacatttaacaataagaacaacaccttcattatcattatcaatatcaatatggatgtttcatacagcaacgtagttaaataaatatgaaattgattcaccattgtgtaatcttctaattgcttcagctaaagttggacttatatctaaaatttccaaaattggacattgacttacatgttcacccaaaggcattgaatttgtacaaataattttctttaatgaacttttatttaatctttcaattgcattaccactaaagataccatgagttacaattgcaataacttcctttgcaccttcagctaataatatatctgaagctttacataaagtaccacaagtatctgccatatcatcaactaaaatacaacttttatccttaacatcaccaactaaaaccattctactaacttcattagcctttgctctctctttatgaattaaagcgaattgggtatctaatttgtcagctaatgaagcaactcttttagctccacctgcatctggtgataccatcataacctcatcagtatttttataattatctttaatccatttaagtacatttggttcagcatataaattatcaacgggtatactgaaaaatccttgaatttgctgaagcatgtaaatccattgtaataacatgattacaacctgcagttgttaataaatttgcaatcaatttagcactaattggaactctacttttatcttttctagtcttgtcttgcatatgggaaattaggtataacagctgtaattgatcttgcagatgcttgagtacatgcatgaatcattaataatagttccattaaataatcatttaaattatcatatcctccacaaccagtttgaatgatatagacatcttcatctctaacagaatcttgaacaacaattgcactttcattgttttcaaatttaattgcttcaatatttgaaagtggtaaatttaattttttacatattaaatttgcaagttcaggatgtgaatttgcagctaaaattttgatattattctttgcttctttgtttgtcattgatctatcagataatcctctttcggttgacataattaactaatatattatattacatcacaactaaattttaaattttgcattaaatctatataccccagaaaagtagaaatttaaaaaaaaattatttggaaaaaaaacatgttgcataaattattattggatttatcaatgtaaggcatagtcgatcgactttgtgtgtgtttatcataatatattaattaaaggacaactcagtatatacatcaaaggaagttcaagccttttgattgtgatactatttgttaactataatatatcaaacaatgtcaacacaagcttataagagacttaataaagaatttaaggagatttcagcaaatccaccaccatatatcattgctagaccatccgaatcaaatattttagattggcattatataattactggaccaccgggtacaccatatgagaatggacaatatcatggacgaattacatttcctagtgaatatccattcaaaccaccaagaattaagatgtgtacaccatcaggtagatttgaaattaatcaaagattatgtttaagtatgagtgattttcactgaagaatcatggaatccatcatggtcagttgctacaattataacaggattattatcatttatgacaggtgatgaaagaacaactggtagtatagttacatctacacaaaccaagattcaattatctaaaaaatctaaagaatttaatacatattctaatcctccatttaagaaaatattccctgaaatttgggaacaaaacgttattgatttaaagaaaatggcagaggaggaacaaaaagcagcgaggactcgtataacccctcctaaaccagctataaaacaggaaaagattattgaaaatcttgaagaaattgaagaccctgaagataaaattcgtgctaaactaatcaatgaagcagcccatgataaaaccggtaatgttaaaaccaacagtgataatactaataaaaatgataaagataaagatgataatggcagattcaattcaatttacatcattgcatttgtgataataattagtattattattaaattattatgagaataaaggaattattatgatatttgatcaagatattcttgtaaatcaatttcatcgaaaattatttcacacattaatgaacaagatgggcaaactgcaatattttcaccatcttgtaaatcataaattgaaatttggaatctatcaccacatggacatggataagtgaaaagttgagtatctggatcgaaggtaaaatcttcaatttctatttgatcgtagatagtttcagtttctgacattgtttattgggtatagtatgaatatagaactatgtagtaattatttgaagattttaaagattttaaagaattaaaggttttaactgttttttcatatttctccattaatactattgaaaaaaaataattgaaaaatttaaacttaattacgtacaaaatattatgtaatccaaaacaaaaagaaattaatatcacgtgtaaattactaggtctattttaaaacttatcaacccttttttcctttttctgatgggtgcgcgggtgacataaaaattataaaagacattaaatctttagtgcgttattttgtgactgcgtgactgtgaaaaatactttgaaaaaatttaccttcccccaactgcccgcaccatttcccactgaaaaaaatttatttgctcccagtaaacccaacggggctaccaattccagaatctcctccttagcgttgacttgatgatttttttttcagattacttagtattatagcactttttacttaatagatttttctatttagtattattttaaattttaatacctattatactttatttcctttaacacagaataatgtacgtattaaacacacctatatgaattaaatatattatattaatcaagttatcaaatgttcttaatgacaaaccgtcgatccgttgaaattatcaatcatttatcatatcataatttaaacttatgttaaaatcaactagaattaaaggaataacaccaaatataacaaatgtttataagaatctacaacatatatatcatacaatatcagttaatgttaatgagaacactttaatagcttttgatatcactaagaattttatactaacatttccttaataattatcattattatatttatcttatttttttattacagtcatcatgggtatttcaagagattctcgtcacaagagagcagccactggtgcaaagagagctcaattcagaaagaagagaaagtttgaattaggtagacaaggtgctaacaccaagattggaccaaagagaattcactctgttagaaccagaggtggtaaccaaaaattcagagcaatcagagttgaaactggtaacttctcatgggcttctgaaggtgtttcaagaaagaccagaattaatgttgtcgtctaccatccatcaaacaatgaattagttagaactaacactttaactaaatctgctattgttcaaattgatgcaactccattcaaacaatattacgaatcccactatggtttagttcttggtaagaaaggttctactgaagttgatgaagtcaagagatcaaaatcagttcaaaagaaattagcttcaagagctgatgaatcaaagattgaatccgctgttgcagctcaattcggttcaggtaaattatatgcagctatctcttcaagaccaggtcaatcaggtagatgtgatggttacattttagaaggtgaagaattagctttctacttaagaagattaactgcaaagaaataattttgctccttttaatgtatcttaattaattttaatctcctttttataaaaaataaatatcacaattctaacaatcttattagtttaattgaatttgatctattatgaaaaatatactgtaatcctaaattaaagcataactaagatttttgaagtgtattggatctactgatatgaatacacttcaaaaatcattcaacaatttggcatatcacagttgagtctctacagttaactgacttcttatagattacatgatctaagaatactacacctatttctgcatactttattagcagtttcttaggataggaaattgtatgtattattgataataacaatatctaatgatattgacctttatcacaagcataaagtagacttcataatcagcaccagaagtttaaaggtagatttaaaccaaatcataacaaaggtttgtatgatacatagtgcaaactacattcattgtaaaatacatattattagttataaaaatatctaaaacaacgcaatactttaattcagtaaaaaggcaacaattatttatcttcagattccgaagaatcagtacaggtctgtggaattgtatatcatcattaaaaagtatgttttgtttcaaatataaagaaaaaagacaggtttaaatgtataatgcacctgcattttacctgaaaaccctggtaaaagaaagaagtcattaggtaagtgattgactgtggatacatgcctccttttataggcagcggtttaaaaaaatattttttcagtagcggtttgatcttatttttagggtttctctacaaattttatatagtgaaggaatgtagtaaaattggaaatggaagtagtaatgatagttatacaggaactataataaaaatgaattaattcatgattatgattatatagtgaatgatgcatgattaatttttagtagcaactttttcagcctttgatttatttttattttctctagtatttttagcagtttcaccagcttcagtatcaaggatgtaatcccataatctaaatgatgatgcataattaccaataaaatgatgatgatgttcatcatgatgatctgcacctgcccatataaataagaaatgatgtagagaaattgggaattcataacctgaatgtgcatcaattgcttggaataatctaagtgtaatccaaatacaaattgtaaataaatgtaaatctcttgtaaaataacaccaaacaattggaataccaacagtaccaaaacctaataacataacttcaattggatgtgcatattctgctgctaaaccaaaaggtgcagcatatctatgatgttgtttatgaatatatctgtaaaatgcaccataatgaatacctctatggaaccaataatgccatgcatcctctaggaaaaagaaaattgtaacttgaattgctattttagataaacttgggaatggtacatcatatgagacaccaattttttcacaaattggatgaaagaaccaaattgggaatgcttcaacaaagaaatgtgattttaaaacagattttgtacattcccattgttctttatcacttggataaacatttggttgaatcttatattttttaaaatatggtgttctatcaataatataccatggaagacatctaccgaaatacattacttcatgaagtaaaaagaacagcaaaccagttgcaaaaatatcattatccatataaacataatatgatgcccatattttttcaaagaagtttaaacctggtacttccttaattgtgccataaatttgtgaaaatgtttcttttgatggaatatcaactgaattcaaaccgaaaactctatagtaaaatgaaaaaaggcaatgttagtatttacttctgtattaagaatccacgttgtaattataaatcatgtacatactgactcatcttgttcactggttagaagaaagaataataataacctaaaagaaagagataaatgatagataataaaataaataataaattacaatagtagcaataattacaaaaagaaaagttggaaaataattatgcccaaataaacacggttattattgaaaagtatgatatcaagctcgcggaacgataaaattgcaatttattctatacgagctatacgataagtgcggaacgagcgtattttggactatcttcaacttcatgttaatgttgatgttaagatgataatgttacaagaataaagtttataacatattgaatatttttttaacaatttaaacagaaaatacaaagggtaaacgtgtgtatatatagtagtggtaatagtatattttatttaaatacattcatgctgaagcttcattcttagcaacccattttcttgcatttctaaataatctaatccatggaccataaccttcccattttttactttcttctaatggataatatgaattagattctaatctacaaactctttcagggtgtggcatcattgctaaaactctaccgttcaaacttttaatacctgtaataccatttggtgaaccatttggattgaatggatatttctcagttgcaacaccataattatcaatatatcttgcaccaactaatcctttcttaataaatgaattcatttgttcttcattttcccattgtgctctaccttcaccatgtgcaacagcaattggaattcttgatccattcataccatcaaagaaaacacttggattttcattagattctggtaaaatctctaatgtacaaactctagcttcatattgttcagatttatttctttcaaaacttggccaatcttctgcacctttaattaaagattttattttacttaaaaattgacaaccattacatgcaccaaaagcaaatgtatcagttctttcattgaaaaatttagaaaattcatttcttgctctttcattatataaaactgattttgcccaaccattacctgcacctaaaacatcaccatatgagaaaccaccacatgctgctaaaccaacaaaatcatctaatgtaactttacctgaaataatatctgtcatatgaacatcaacactttcaaatcctgcttgttggaaactccatgccatttcttgttgaccattaacaccttgttctcttaaaattgcaacctttggtctacttgttaatgatttaacacctaaatcatctgctggttcaaatgttaatgcatattgtaaacctggatcattgttatctgcaatattaccaaattcttgatctgcagattgtggattatctcttaatttttgcatatgatatgaggttaatgtccattgttcttgtaatttacttcttggttcattaataacaacttcattgttaaatttaacttgaatatcttgagttaaatcaaagactggagtaccaacaattgaaatatattcacttgtaacaccattagtttcaaaaatattaacaaatgatgaatattcagattttctgatttggaaaactgcacctaattcttcgttaaataattcagtgaaaaacatcttgtttaccattaatattaatatctaatcctgatctacctgcaaatgccatttctaataatgttatcaataaaccaccatcagagatatcatggtatgctaaaacatcagcattattatgtaatgcaatagtagaattcaagtaacccttcaaaatttgattatcatgaacagttggacaagtattaccaatttgtttataaacttgagcgaatgctgaaccacctaatgattttccactcttagcagaaagatcaacatgaactaaaatagtatcatcttccttttgtaattgaggagtccaagttttggaagtatcattaacaccacagaatgcagtaataattaatgataatggtgccataacagtattcttttcccaagtcattttcattgacattgaatctttaccaacaggaattgaaatacctaaatctggacataaatcaataccaattgcttgaactgccttatataatgcactaccttcaccaggagttgaagcagatgacatccagttagctgaaagtttaaccatatctaaagttttaatatcagcagcaactaagtttaataatgattcagcaacacacatttttgcagaagcagcagaatcaataattgcaattgttggcttttctcccatagctaaagcttcaccagttttaattaattcatcacctaatgatgtacaagtaacaccaacatcagcaacaggaacttgccatggaccaacaaattgatctctatcaattaaaccagtaacagttctatcaccaattgtaataaggaaagatttagaaccaacagcaggtaattgtaaaactcttgataatgattcatttaagttaatatttgagacattaattggtgataaatctaatgttttagttaaatcatttcttgacatttttggtggtttaccaaataataatgacatttctaaatcaattggagttgtacctaataatttatcagttaaaattaatctttgttcactagttgcagtaccaacaacagcaaatggacatctttctctttcacaaatttgtttaaataattctaaattatcttgggcaacacctaaaacatatctttcttgagattcattacaccataattccattggagacataccaggttctaatgataaaatatctcttaattcaaattatagcacctaaaccattatcatgaactaattctggtaaagcatttgataaaccaccagcaccaacatcatgaatacattgaattggagattctaaacctaaactattacaagcatcaataacttgttgagctcttctttgcatttcagggttacctctttgaacagatgcaaaatctaaatctgctgaagccttcacctgatgcaactgatgatgcagcaccaccacctaaaccaattaacattgattgaccacctaaaacaataattgcagaatttggagtaattttaaaatctgattttaatgctaattgaggtctgattgaacccataccaccagcaatcataattggtttatggaaacctctgatttcttcattaccttcattatttttaactgatgctgttaaagttctgaaataaccggtaatacaaggtctaccaaattcattattaaaagctgctgaacctaaaggagcttcgatcataatatctaatggagaagcaatatgatttggtttaccaatatttaattcccaaggttgttttaaagtctggaatttgtaaatcggagacactgaaacctgataaaccacattttggctttgaacctctaccaacggcaccttcatctctaatttcaccacctgaaccagttgatgcaccagggaatggggaaacagcagttggatgattatgagtttcaactttgatcaaagtgtgaacagtttcctttgttgaagtccaagaatttttatttttcatatttggtgcaaaaacgtaagctggagaaccttcatagacagctgcattatcactatatgctgagattgtatattttggatttaatttatgagtatttctaatcatttggaataatgacatgtctttatcttcattatcaattttccaatcagcattgaaaattttatgtctacaatgttcagaattaacttgagcaaacatgaataattcaacatcagttggatttctatttaaaatatttttaaaagcatcaattaaataagatatttcaccttcatctaaagctaaacccatttctttatttgccttaattaaattttctttacttgaaataatatcaacatgaactaaaggttttggagaatgttcttcaaaaagatcattgaattttggaattgattcattaatatataaagattgagtcattctatcataaactgaagcaaaacatgaaaactgtgatttttcaaataattctaaaactgggaaaccagctcttacagttaaaagaatcgctaaacctctttcaactctttcaattttatcacctaaaccgacaacttcaacgatatttgtagctttagaagaccaaggagagatagtacctgatctaggtaaaattctaattaagtaagtatcttgacttaaattttgttttaattgagtaattgaattttcatcatcaccttcaagtttaactaaatttgataataattgatttttttcatcctttaaatctaaatcattatcatattttaataaaacattaagtttattaatagtttcttcatctaaagattcctttacatgaatataatgaatttgacaagatctaatatcagtaacaactgatgaattaacagaactattaatatcagagattaaatttgaaactctgaaatttgataatgcctgagatccatggtaaaataatcatattatcagaatttgaagacatgataatttttttgattaatttgattcgatttgattaatgcaattagtgaatatcaattccttgaattatgaaaagaaagaagatctaaagagaagttcaagactgatatccagatcaaaaacatgttaattctactaaatcgataatttaattaataaattttttgacatgcatactttctattgtccgtttaatcagtcactttatctaagtgctaataactactattaagtgaaaaaaaatttttgacttctctctgcgtgtttacgtaatgtgttacgtaagacagcgacgtatcgacgcttctgggatctcggaattttcattttcagcttcaatgcatgagaagttagaaaggtgttgatttaacattggtttgaatatagatagacaaaggctggtgtggacattacaactggaaacatgactccggtgaaaaggaagaatgataatcttataagtgaggatttgcatgacgaaaagaaagtcaagttggaatcagttacagaacaaaatactgataatagtggtgatgaaggtaatgtagatgtcaatgatgatgtcacagaagataaaggtaatgatgacaataatgatatcaatgaaaaggataaagaaggagaggaaacgcccaaaaatggtgatgaaaccactggtgaagttgaagatgaagagaaacgtagagtgcgtagttatcaatttgacggatatacttattcatataaggtacgaccatctgttttagaggaagaagatggtaaaatacgatttgttgttgtaaataatgatgataaacatgatagtatgattgttttaacaggtttaaaaaatatttttcaaaaacaattacctgaaatgccaaaggcttatattgctagattggtttatgatagaagtcatttatcaattgcgattgtaagggataatttagtagttgttggtggtattacaattcgaccttttgaaaatcatgaatttgctgaaattgtcttttgtgcaatatcttcaactgaacaagttcgagggtatggtgctcatttaatgaatcatttaaaagattatattaaagcaacaacaaagattaaatattttttaacatatgcagataattatgcgattggatattttaaaaaacaaggttttaccaaagaaattactttacctaaaaaagtttggatgggttatattaaagattatgaaggtggtacattaatgcaatgtacaatgttacctaaaattcgatatttagatagtacaaaaattttatctgttcaaaaagctgcaatattgaaaaaaattagatcaataagtaaatctcatgttattcataaaggtttatcacattttaaagatgaaaattttactccattaaatccatttgatataccaggtatcaaagaagctggttggacaagagaaatggatgatttagctcaaaaaccaaagaggggtgcacatcatattccaatgttaacaattttaacagaaatgcaaaatcatccatcaaattggccatttttacaacctgttaatagagatgaagttgccgattattatgaagttattaaagaaccaatggacttaagtacaatggaagttaaattagagaatgatgcatatgaatcaatggatgatttcatttatgattgtaagttaattttcaataattgtagacaatataatggtgaaaatacaacattctataaaaatgcaaataaacttgaaaaagcagttattgcaaaattaaaagatttccctgaatattcaagtagtttggaaattttgacaaaaaggtaaaattaatgtgattatgtttaatgatttcaatgtataattcgtgtataatagtaattaaaaaagattttggttatttaaaatgaacaagaagatattataaaagaatgaaaaatattagtatacattatatcagaattattcttccattctatcatcaccgtcattagtaggagcaacatcttcattttccttttcttgttgttttaaaaactctataatttcagcaacttctttatcagaatatactctaaatccaccatcttttgtaacacttgctaattgagcattatttgattctaatttttcttccataacttgtttaagaattttcaatgataaaacttctgcttcccttaaagttaaagatttatgatattcattttgtaattctgcttgagcaccttcagaacctgaaccaattgcctttgcatcatatctataaaatgtacctgaaggttctgcatgatataattgaggtcctttatcatcatcagtaacctgcaattaaaagtgcaacaccgaaaggtcttgacattaatctttcttcacctgatgcaccttcaccaaatcttaaagctaaatcacaaactgattgagttaatgattcaacagagattggttcattataatataaatcatgttgtacagatgaaactctagcatgatcaatcattgatcttgcatcagctgttaaacctgacattgcacatcctatatgtttatcaacttccataattttttcaatactatcactctctaaaagtgatgatgaaactctcttttcaacactcaatatcacaccttcacttgttgaaatacctattgcagttgaacctaatttaattgcttcaagtgaatattcaacttgaaaaagacgtccttctggtgagaatgtcgaaacaccacgatcatattcacttcttgttaaaaacattgttgtatttggtatatgttacagtaatattccctatacttcaatcaatatagagggcaaattagaagctaaaagctgtacataacgtaatggaatgaaatctttgaatttgttagcgagcatgaatatttcaatttttgctgatgtaataaacaccttttttgtattgataatttgttataggactattgcacagtttgtcttttcttgaatcaaaaattaatgttaataaagcaatgtttatatagagtatagttatatgatctacatatatgatagttaattaaattaaattgttaatctttcattatataaatctttatcatctaaagggtgtgaataagattctgaaccatcagcaccagctttttcattatttaattttaaatgagcatctcttccataaacaaaacctggtgaaaaaatacacataatcaaacctgctaaagatatcattaaaccttctaagatatcaaaatagatttctttagtggcaattttagaagaccaaccctcagctgtttcaattaatctatagattgatctaacataaattaagagaacagaaactgatattgcaacaaagaaacaatttaaatattttcttaatctaacatgtgaaaaattaggattaaaatttgaatcaccaaattgtttcttttctttaataattttaacaataaatgaataccataaaagctggaaaactgacattgttgcaacttgaaatgctaaaccaacaatcattacattagaacctgtactaactgaattaacccttgaacctgatgagataccaccaccagctccttgaataaaaattgataaaacatcacaaataatgaaaatagttgaataaagttttggttttaaataagaatattgggtaccataaactagaactaattgtgcaaaaatattataaataccagccattaaaaaacatggtgcaacagtaatacaaactaattccataacataagcacttctactagtatcatttaaagtataccaaattctaccagaataacccacaacttctaacaataatccaataccccaactacataaaaaccaccattgatgactccaaatagatattgtgcctgttataacagtgagaaatgaaaatacaacagtatatgctataccacttgcaatatggggtgtttcaccattaaagaatgactgtctagcaacttctgacatttaagtttggttgttttgatgaattagtaaaattttattgaattttatgaaaaaataatcataaatttaacatctgacccatatttatcaattctgtttgcaattgaagacatatttatagtatttttcagatattaatattttaatattatattcatactatattacattaaagatgtcggtactacagttttccgttggtttaacttagggatggaaagataacattaacagttatgattatacataatgattttaagattttaagattctaacaaattaagccccaattttaagcctctaatttttttaagccttcaattctaagtctccaaaatgtaacgttttgattgtccgttgcgggtatatgcgggtataaaatttaaaattaagataattcgtagttcctcggaacccctttattccaatatttacttgtcagaatcaagacaataatgtaggatataattcttgattaataaaagtgttaaaacaaagctaaaacaatgaatttgatgattgctaaataaattataatgtagttcaattgagatatccattattacgtaataaaaatacattttataaaaaaactgagtcattcacaatatcacgtgaccggtctagaacgcgcgtggtgcgcgtaaaaaaagttgggcattttataatttaatttaatccgaaaagggaaatccctccgcttgtttgtgctaagaagaacccaaatttaattaagtttagacagtttctattgtggtggaaaattagaaaatttttttttcgtttctcagtgaacgttaaagtgactctattctgtacttgtctcggtggatttgtgcagttttcctgttcagttggtataaattaagtggctttggcacttttttcacttcattcaatttaaattttcttccccagttgcttctttctctttgtcaagacaaaaatcttacatataaattcacaatgcaattctctaactcagctattatctcaatcgcttcccttttagcatctgtctctgcagaaaacattattgttgctcttaactctgatgttgcaggtaatgttaatgattatttacaatatgttcaacaaaatactgaagttaatgctgcaccattattatcactttaccaacaagcacaaacttatactgatgattcttatactaccttaattactggtgaagaattatcatcactttcagcatttgttactcaacttccatggtattcatcaagaattgaaccaaatgttgatgatgcttctgctacttcatctgaagaagcttcatctgcaccttctgcaacttcatctgttgctccatcaactaccgcatctgttgctccatcaacttcttcatctgttgctccatcaacttcttcttcatccccagttgaaacttcatcaaccccagctgaaatttcaacttcaactaatggtaatgcaactgaatcttcaactcaatcagtttcaagtgcaggtgcagctaacttattagctccaggttttgcattagctttaggtgcaattgctttattataagtataatattatttgatatgataacatactataatatactataatttactattttatcttacaatctaatttaatttactttaatttaatttaattaatttcaattaatttaatcaatcagtcttgtaaacattttgttttattgtgctatttacctttaatcatttttacttttttacttttcctttttttaacgttcataattgtataattgaataaattaactattaacaatcaagcatctaatataatataatacaatcactataattataattagtacaccatacggacgtaccaggaatgtgtgtgtctccacagcatgtcaaaaatagcccttcgttttatgccaccgccactagctctttctcacacttccgccgttccttgaaactcatcgctcacttatagcctattctctaagtttgtggcgcattttctctgttttcacaagttctttaatgtggcgcatgattttgcattattaaatatcgttggaagagggctcagcgatttatttatataccccatttgaaattaacgaaatctatataaaaggctcagctgaagataaagaatagatattgatgttgatttcccttctttttccttttagcaagtatggactcttacgctacaaacttactacaatatattccaggtgtatctattcttgaaggtgcaattcaaagtgttttaattaatattttgaaaactggtccaattccaaatcatttatcattcgttatggatggtaatcgtagatttgctaaaattaataacttacctttaaaggaaggtcatagacaaggtgctgatgctttagctagagttttagattgttgttttagaattggtgttaagaatgttacaacttatgcattttcaattgaaaattttagtaggaaacctgaagaagttgatacaattttcagtttattaaaagttaaattagcaatgttagcaagtgaaaatcaattatgtgatttacatagtgttagagttaaaattattggtaataaatcttatctacctgaagatattttaagtgatattgaaatggttgaagaacgtactaaacatcatgataaacatgttttatttattgctttcccttatacttcaagggatgatatgtggtatgcaactgataaaattattgaaaaatttaataataaggaaattactttagatgatattaatcaagatttatttcaaaataatttttattataatgaattatctgaaaatgttgatattttagttagaacttcaggtcatacaagattaagtgattatatgttatggcaatgtcatcaagatagtgtaattgaatttccaaatactttatggccaaattatagattttataatacttggtggacaatttttaaatggagttattataaaactttaattattcaagattcagaaattatgcaattaaagaaaatatctcaaaaggatgttgatgaaaaatataagagagaaattccaaaaattcatccaccatttgcttcagttaataaacattgattgtataatatttagactgatatctttaagtcattgctagattttattataaaagataatttaaataattcattgattgattgattgattgattgattgattgattatataggaaatatttagttatataaaaaaaatcatctatttaagttaaaagatgaatagaaaactttaataatgtagaaaagtagtaattaactatataaagataataaggaaaagcaaaacgattgaattgtaataactaaaaagcaaaatagaataaagtggttagtttaatttgttttgattttttatgattcattgaataataatgatgaaataattaattaattctcttcagaatatctatgtaatgattctaatgcattgaatgatttaaaagtaccatttttctctaaatcttcttcaggattatgagcagtttcacctttgaaatattgtctctttgcaaatttccataattcagcagaaagtaaaaataataatgtacataagaaagcccaagcccaaccatgagtaatacctttttgaaggaaaaacataatcattgaataactggaatataaattgttggaattaatgtaatgaatcctaagtataactgaccaaaataaaaattgattaccccataaatctttcatccattgagttaaaggtttttcacaatctggatgcatataaaataatgatcttcttgtatgaataacttcccaagctaaaactaatgcacaccactgtcattgaaacaaatgatgcagcccttgctctaaaaacatattcacatgaatcagaataatctgttctattacaattttcacctaattcaccatgtaccatatgcataaacttcaataacaaatggaatcatacatgcacctgcaataactaatccataaacaaacatatcaattaaaacttcccatgtaaacactgaatcttttgcatcctttggtggtctatccatgacatcatctgcagctttttcaacacctaaacccattgcagggaaaacatgaagtgacaacaatgacccataaaacttgaactggtgataatgggaagactgaaaagccatccttatctttaaaaactaaaccaactaaaaggaaaattagcttgtgcaacagttcatacctagtaattgaataacaaatttttgaatattatcactcattcttctaccttcttcaactgcatttaaaattgatgcaaaattatcatctgctaaaacaatatctgatgcatctttagcaacatctgaaccatttttacccattgcaataccaatatctgacatttttaatgatggagaatcattaacaccatcacctgtcattgcaacaatttgatttcttctatgtaatgcttcaactaatctaactttggtttgtggtgcacatcttgcaataactaatggtagaacaggtaatgcatcaatttgatcttcacttaatgcatcaaattgtgttgcagtcataaccattgaattaataactttttctggtaacattctaatattatctggtaaaataccaacttcttttgcaattgcacttgcagttgatggatgatcacctgttgccatatgaactgaaatacctgcatgatgacataatttaacacttggtaaactttctggtcttggaggatcataaataccaattaaacccagaaaatgtaaatctttttcaattaattctctatccattttttgccattttaaaccaagatgttgatcatttggaattctctttgcaaatgctaaaactcttaaaccatttgatgataatttattcatttgatcttctaaatttgtaattgtattttcattcattaattcaatttcaccagtcgatggattattccaagttgaacataatgttaaaattctttcaactgcacctttagtataaatagtttcaatattatcattattatttttataaattgatgacattctcttaattgatgaatcaaatgggaattctgctaaatattcaaattggtttttattttcaactaattcgtctctactgaaacctaatcttgtaacaaaaacttgaattgaaatttcagttggatcacctcttgctttccattcgttaataccactatcatcaatatcttcataaactttagcaacattagccaatgaagctgttaaaatccaatttttaaataaatcatatttagaagcattatttttgtattttgattcaaattcattaaaagtaatccaagtaatttcattttcctttttattatcttttaaatttgaaatttcaacaggtgataattcagtaaatctaacagtacccaatgttggattaaaaggttcattgaaatcttcaactgaaaaagtacctaaacttggaatataaacttgtttagcaatcatacgaccttgagttaaagtaccagttttatctgaacaaattgcattaacagaacctaaattttccaaagcatcaaattttctgacaataacatttcttttcaacatttcctttgcaccaacagccatagtaatagttaaaacaacaactaaagatgaaggaatcatagaaagagcaacacaaatagcataaacagcaacttccttagtgacattaaatttttgagaagccataacaacaattgcaaaaacaactgcaatccaaaataaatagattgctaaccaagataatctaatttttaagggagtaccatctaaaatacctaagatataaccagttgaattccaaatagtccaaccagcagcatgagcataatcttttggagaagcttccgatttattttcaactcttttgataattgaattaccagtattaagagctttagcaattttaccaatttcagtattaagaccagtcaaaacagcaataccaatagctctaccttttgaaacggttgaagaggaataggctaaatttaaacgatcaccaactggaatttcttgattaaagattaaattagcatcttttgaaacaggtaatgattcaccagttaataaagcttcatcagtttcaaaattatgagtttcaattaatcttaaatcagcaggaatagtatcaccaactttaacgataattaaatcaccaggaacgacatcttcagatgctattgttaattctgaaccatttctaataactacagctgatggagaactcaaatttttaagggaacccattgttttttcagcattatattcttgttgagtaccaacaacaacattaagaacaataataaaagtaataacaccagcagtaatccaatctttaatagcaaatgatataatcattgaaataataaggacaataatcattgcattaagagtttgtctcattataattgaagtaattgaaattttagaaccatcagaaatagcatttggaccataaagttttaataattcagcagctttttcatttgataaaccatgaattttacttgtattaaataaattcaaacatttatctattggaatcatataagattgagttgcagctgtagatggttgacttggatcattattaactaatgttgaggctcttgatataatatcttctgtaaattcactttttttttcaacagacatataaatgtttaactttgtgtaagtgtgtgtgtgattaaagaggaagtaattaaagtaattaaagtaattacagataggaaaaaaatattacttaaagtaaataaaatgaaaacatgaaaaagagggatgagctgattacttatatagaaacagataactatggaaaaagagtcaaaaatagcccgatgtgataagaaaaaaaaattaaaaataaaaaaatgaaaaaataaaaataaatcttatcttttttcaaaaaaaaaatagattatgtcatgagtggcttagaccctttttttgtttttttctttttttaactattatttcctattatttctgattgttttcctattgttttttttttcaagggtctatctttataacttctcttatataggttagatatggggtagattgagttatgccatggtaattggcccgataactgcggcacacacatatatatattcattttaatacactatactatatttattaaaagataagactgaaaggaggtaataaattacaatattaaatagtacaaaatatgacgtaagtgatgaataagggctaatactattaagatataagatgatgtttgctaagctccctctcagccaaattgggtgatttgagcaaaatttgaatttacgagggggggcagggcagggcggaggcaattttctctcatggtgagggagtggcttatcaatttcctaggagataatagtcgacccatcgacgtgtataatatgccctactttttaaaattattaataaatttagcttacgcgtcacccgttccttgaaattttgaaaaaagatttatcatattacaaaagacgcgtttgatacatgtcaaagagctatttctgatatattttaatgacattgtttcaacctatatcattttttacgtgtatcactgctgggtttgagagaagaatctttatttcttgctttcaattttgcttcaattctccattaactttgttttcttacttttggtttcacttattctttcccttctttatcttcttcttcttcttcttctctttcaaactattattcatcaaatcatcaatactcaaatgacatcctcacagccattcaataaattagtcaatttgaaattattatacacttttgatgatcaaaatacttttcttgcaagatcttcatctccaattaatgctagaattataactttaccaaatcaaccccctcataatggcttacaaattggttgtattgatttaaaatcttgtttaaatttattatcttcaatatctcctgaattctttcaaaaggaaatggattattcaatttattataaagatgtggtagaatttggtcaaccttatgttgcttctggtctttgttcaaatatacttaattcaaattcttcaaatattataataactggtacattatctgttaatattttaaatttatatcaaaataatgataataataatgataataataaaaataattttaataacaaaaatcctgcaatactggatactttagatattaaattgagactatctcctctctcaaattccattaccaaaaatcattcatcatatccttataataataataataataataataataataataataataataataataataataataataataataataataatagtctaccctcaaatacacagtttatacaacagcatactattaataacaacaataataacagtagtcccttaacaaataatgaattagtcacacctcaaacacagcaacaacaaagaaaaaagattaaaaagcaatcttcaatcgttaataattcattaaataataaaattttaccaaatttacctcaattagcttctcgtactcaatcattaccctttataactgaagattctttagctcatagaattagattatctgatatgatgaatgaaaaaattgatgaagaagttgattcaaatggtcaaccaatttcttcaagattctcaaattttcaaaatgataaatcaatcaatttagataatcaaccaacaaaggcaaaaaaaagtaaaagttttattcaatctgttgttaaaattggtaataaaccattaaataaaaagagtaataatactactaaaacttcttcttcatcatcctcgtcaataattacaaattcaaaacgttgtattaattgttcttcatcgaataatcctccttttagatttttcaaagatggtatttttgaattggctaattctggttatttatgttcaatttgtacatcttatcaatctaaaaatgatataaaacaattacgtgaaagaggtaaattaggttcaaagggtttattagatggtccatactcttcgaatattgtacaaaatcaaacacagaataaagttactaaacgtacaaagaagaaacaatcaattaattcatcactaataattgataattcaagttcaccccttttttcatcatctcctgttaatttgcaaaattcttataatggtggaagtttattaaataatgttgttggtaattatagtaaaggtaaaagatttaataaacaatatcaaaccattcatgaaggtattaataatgaagatttattagatcttttaaaattagactccaactttaataatggtagcaacaataacaataacaacaataataatcatttagatatgaatatgttaatgaatcataatatggatttgatgaatatgcaattgaataatggtttggaaccaattgaagatatgtttagagtttctgatcataagttttcatcttcttcacctactacatcatctaaaaatcattctaaaaataatacacctgatgataataattattataaagatgttgataatataccagttgatgcaactaaattaaatacaacacttataccattagatgatgatgataaagaaaatttcccacctaataataataacaacacagcttcagaaatgcctcctccatcattatcaactaaaccatttaatttacataatgaaaatgcatttatgtcaccaagtattcaacgtataattgagtcattttctaatgaaccaacatcgccaagtaaaacaactggtaatgatgaatggaactatgatttctttaatgaaccatcatcagaaccaattaataatgataatttatcaaatagatttaaaggatgtgatgatgttgaaattaatagagttttatcacgttcagaaaaatttgatgatataactccaaaagatccaggtactggacaaaccattcaaaatggtgattctccaaatggtttcaaaatgactccaagaaatcttgaaatgaatgaaataaaaactgatgtaatggaaccaaatgaaaataatactaatgataataataatcctaataatcctaatactattacaaaatcaaattttgttaaaactcctaatacaaatacaaagaaatctaaatttgaaccatcaagttctaaaaagtttaggttaccaatgccaagttcaccattttttcaagtgaataatgaagatgatgttgaaaaagatgaaaagactttagatacaacaattaattcaatggttaattgggatgcgaaatcctcgcctctaacagaaccgctttcatcatcaattgatgacaaatagcaactttactaaataaataaataataactaataaccaataatacgacttaatgtataaccaacgtatattctttcctaattgggtaactaaccatttctccaattcatgttgtctttattctaaaaattcgcgattatccgataagaacgtccaattcagcgatgacataatcttgaacttcaacacgtttacttattttccaacccccgggtttccagcttaaaaactggtatatcttttctttttaatttctttctcaaagtggttacacacgctatttagagaaccgtacactagaaagagaagaaatatattttgacaataacttttaaaaaatatacatagtatacactcatcaataaattcaaataaaatatcagaataatcaaaataagagtaataaaaatatgttagcatttaaaacaacaggatataatggatattcctgtaagtattcaccattttatgataataaacttgcagttgcaacagcagcaaattttggacttgtgggtaatggtagactttatatattgtcaataactgatgatggtagaattatacaagataattattttgatacacaagatggattattcgatatttcatggtcagaattacatgaaaatcaagttttaacttgctcaggtgatggttcaatttcattatttgatataacattatcaaatttcccaataaaacgttttaaggaacatcaaagagaagttttctctgtttattggaatttggttgataaatctattttctgttcatcctcatgggatagtacagttaaagtttggtcaccaattagagataattcattaattacattatcatcaaataaagatactacaataaaaactgataaaaatatattggatcaacctccattaagtacaaaaccaataataccaaataataataatgattgtgtttatcaagcttcattttcacctcatgatccttcaattataatgtctgttaattctgcttcactttgtcaaatatgggatacaagggcaacaaatcctttagctatgcaatttatttcacatgcaggtatggaagtactatcctgtgattttaataaatatagatcatcagttattgcaactgcatcagttgataaatcaataaaaatttgggatttaagaatgatacctgatttacaacataatttccttgcacagaagaatagagttggtccttcacctattaataaactgataggtcatgattttgcagtacgtaaagttcaatggtctcctcatgcttctgatactttaatgtcggcttcatatgatatgacatgtaaaatttggaaagatcaaactgatgaaggtgctagatatatgagtaatatgaaattaagatatggtgattctctaataaataattttgatatgcataaagaatttgtattaggttgtgattggtctctttggggaagaggctatgttgcaagtacaggttgggatgaaatgttatatgtttggaaggcaatataacctaatccattctacataataatatttcaaaattttattcctttacggtttcatctttttcattttttttatctttctttatatcttgggggtattttctataataaaatggcatagtattatatatagtacattaaacattaatatttacaaaatcaaactaactcgatgtctttgtgtctatcacttgagaaacgttcaatttcagtcattatacgtgtaacccaaatatctctttcaattcttgatctagctaaaaataaaattgctcttcctgtaacacctaatctattggcagattttattaatgctcttgttgtatgcctttttccactacttaattcatttttttgaaataaattatcagaattgccagatttactatccgtctctagattctgatcatcttcttcactctcatcatctatatcaaaatctgtttcattttcttcatcatgatctatatctgtttcggtttctgaatccgaggtaatggcaaaatcaattattgattttgactcatccttaaaattgaaatcacttttactatcattttctccatcctttttatctttggtaatatctaattttctaaatttattcttcaaattggagagtttagttgagttgttttctgaagtttttctgtgtggaatattcatagtttgagcttctgattcgcctgtaatattaatgtcatcatatttggatcttatctcactattgttgatattcactcctgttttctttttaatattttgaaccattgtcttcttagaaccaaaccataaagtaaaagacctcttttgttttgactcagtacttctccatccatcattataaactctaggtaatccactatatccattcaatggattggaaaagcaatttagtatttacatcacctgtgactttaccgacagatgaaaaaacataacattcagctaaagatatagtagcaaactttctatgatacgcacagtttttagcaactttcgttctgctggatctattgaacggtagatataataccaaaaatccaggacttaaaactgcatgaaatagataaaattgtttactcttgaactttttacaatagatatatccttcaaataaaactggtttatcaagagagtatgttgaaatactgtataattgagaatctgtatatgcgtttgccaattcccacttattcaaaaaattattattttcatttgcaactgttgattcataattatcattttctgtattcattaatttcaaattcatttgttttagtagaacatgtctagctaaatcttcttcctttttgattgtccaatactcagcaagcttactcaaatttttggcccattcatctctaacagtcttagtttcagtttgcaatcttaaaataacaccacttgacatgactaaatccaaacaggtttcgacatactcatcatcgtcattaagttcaactttcttagcaaatttgtggaaatctgatttacctgacatattagaaactgttttctttcctttgggatgtttccaaacagtacttgctgcagttctggtcacaaaacttatctcttttctaggcactaatttaatatcaataatattgcataaatcaataacggcgtgtgcatttgataacatacaagcacgtctttcggcatgatatagagcatttgcatcatattttgaatattcctcttgtgtgattcctggttttaaccattcaatatgatgagctgttcttggaaatggtgtagattgataaacagttgaattaaatttagatgctttctcaagtttgggcaaattggtgacgtccccggctggtgtaataaaattatatgcgaaatcttcattttcttcagagttaggaaatattggaactgcatgataaaagtcttgtaaaaataataagttctctactgaaaatgcataaaataatctataatggtgaccaccaagtttggttttcaaatttcctgatctatcagttaatttagcaacaaatccttcaataggtaatggttcaattaaacttctatcacacaaataatgtgtttcgtgttgaaattctcggagttccagttcataatttgatccaaaaattgtccataaagtttgtacaatcaattcattttcacctaaaatccattctagacgatcatattttctgaaagataatgccaagaaagttctatcattttttaattttttaataaaatattggtattcgggaatttgaggtagtttaccagatttttctagcttaagtatttgttccaaaattagatccaacagtttttcgaatgtcggtagtttgggataataataccctgttggtttatatcctagtttgacaaatttagatttattctcgccttcttctttataagctttgtataaagaattgattcccataaaggtaaatgaaatattgattgctggaatgcttatcaaaaatgcatttgttttattctttcctaaagtttttggactcaataactgtctcaagaaactataccacacaatagctgaagatgttgaatggggtaataatgtatagttcactgttgagtttttcttatttctgcttattctaatacttttatccaaaaaattagcaaatgaaattgatgtatcatgaattgaaagaactaatgaaaattgataatgtctatcggaggcattatcgtggatgtgcaaaaatttctcctttttaatagttgaatgtgtaacatccatcattttattcctttgtccaaatgaaaatcgttttattttctccttctttcttttcaggaaagatttttttgatttatgtgaatgacctatcttagcatcttcctcaaacgaggtttcattatcatcatctgattcataatccttattttcctcagatatatcaccatcattttcgctgtcagaagcatcaaaaaaatcccctggagcttggctatttaaatcagtagttaacgtatcatcttccgcactattagggtattttgtctctaatatatttcgattaacttcttctagtaaattgctttcatcttctttcctgaaaactttgttagttctaaaaaactgaataactgcaggatattctacattgtttgtagctctaacaacaatgatatactctctccatctttcaacaattctggacgattttttagcatctttgtttaatttgaatttttctatttttgtgactaaaactaacattttctccattttaataatatcgccagtttgaaatttttggaaaagtttcttgtactgtctccttctttcaaatctattgatttcatgacttactcctaatcttgcacctaatgtttttgtcttgagcagattgtatgtctgcataacttcatcatcaatgtcagtatatgcttcgtttatattatgatctaatatcccttgaagttttatatcattatgactattttcattattggtattattgtttttgttatcatcgtaattattattattggtattctcagtagggttttcatgatcatttttatcattttcattattcaatttcctgttattatgttcaaagggcatgggagattgtttatctaatggtaatctggtacttttcaaagtataaatacttgatgcgggtaccatcttttgtggttcagtaaatgtaactttcttacctgtatttaaagtagtcttgaaagataccctagttggaaaacattcagttgcaggtggaatttcagccgttttatcattggcattaatcaaatcatcatctgaaatatcagaagctgtaacaaaggaagatgtatctgtttcacaagaatcactgtttttgataagagtttctgaagattttgtaacttcaatattcttctttttagatctatttttttgaagtagtatcattgcttcatttatctctttatctatgattttttgtttctcatcattggttgtttgataaaacttattcagttgggcatcagttttgttttttttactatcattgaattgttgatggtgtgcattacttttcttatgatcaatcattttcttatcttcggaaagatagggctgaatcttaaaatcatcatcctcttcattttcatcggttgtatttgattctgaatttgcaaactcgttaacaatttcataaaatttggaatttgaagtttcattaaattcatttggttgattatcagatgtataaatactattattatttttttctttctctgatttcagatgtaatataaaagattttaattttgactccgataattcatgcgatagtagatgaatatttgattcaataaacttatcaattgaatcaccaaatgagtctgctacatgttcattttctccgtttgataaatgattttttgtcagccctttaaatattaaatcttttatattatcatgtaaagtatcaggcatactttcttgactcattttattgacagcattctcaaattggtgtagggcactgtgttccggatttgtaacattttgcttagaatctgaattaagccttctaaatctgtaaattttagccagtaaaactgattttttatccaataaccaataatgaggaattgaacctaaggatatgaccgtggacgtgttgtaaagttctaaagcatcacaatatttcaccctaaaggccgtgtatgaatctcttggaatctctatataattgacatctctcttttgagtatatgagccattttgcatctttcaatggtatctaatagcatatcaactaaaaaagaaagagaaaaaatataaaaaaaatggagatttaaaattgaaaatgaacttatatcaaatcaataacaacaaacgagccttcatcaatcaataataatattttaaaaatataaaaattacaggagggcaaaaaagggcaataatttttcagttttaattaaataggctgaaaaatgtaaaaggggataaattattattattactattattacataaggacattacaaagaatgcggaattaagtaacttttctaagctgagatttctgctctttcactttttttaactacgagaaatctatacttttctgtctgcttggttgggttataagttatttattataattattaattaaacctagtttgtaagacaattgtctattctggtgttgaatagagtatctttaattcatttgtcacttcatatatattcaattcttattgaaaaagaatatcctgtgtctttattattatactcaatagatcaattattaatatacgtgtttgattctattttagtacgattaaatcataacgcttataaattaatatattaagcacatacacaggcacacacacgtaagcaacttttcattggtatacacctctgagctgtattacattattcatagaataatattatattcttcaacttattaataattcacatttaggaaaaaaatattccatctgatctaatattttttgtttttcaataaattaactcaaaattcctgaaatgtcccgtgacgataatccaaatagtccatttgctgataagtacaaatttagtgatctaacatatgcagatcctttaccatctccctctgtaggatataaatctaatctaaattcaaataaaagacatttttcaggttacagtaccaattcttcaaaagcaaattatgatgattttgaagatgcaaattcaataggtaaaactccaatggtacaccaagattctgcattttcttctaattcgtttactccaataaatttaaaaaattcaaatgttcatcaacaaaatttgtatgaatctgaagaagaaaatgatgagttaccggaattaacaactggtgcaattaaagatgataatttgcaaagaaataaaacaacttttcaaaggcatagatggggtactcaacgtaaaaaggatgggagacctctaaatagaagtaaaactttaaagaaagtttttgaaagttcattacctcctcaactattcccaaaaactgattcaggtgatgatgaacatttatatgagaatgctaataaggatgaaaaagatatgtcacatatgaaaagagatatctattggaaccttcctttacctgccactgatttagacgatcttgggaatcctcctcaatatgcaagaaataagattagaacaacaaagtatactccaattacatttattcctaaaaaatctttattttcaatttggtaatattgccaatgttttcttcttaacaatgaatattttaggtgctttctcaatttttggtgttccaagtcctgcattatcttctgttcctttaattgttattgttgttattaccgcttttaaagatgctttggaggattcaagaagaactgtaattgacctggaagttaacaatcaaatcactcatgtactaaaaggtattgataatcctaattttacaggtgataacgtcagtttatggagaaaaattaaaaaagctacaagtaaattcatattttcaatgctgagaaaaattaagaatcaaaaggaaatagatcctttggctgaagatggttatggtagaaaatccttagatagtattgattatagaagaagtttacagcaagaaagatataataacaatattcaagaaagtgatgatgttaatccattcagtgatccgattagtatgagaaatgaagatacaaatgataatgatcgtgatgaaaattttccaccatttgtttcagcatataatgatgattacattacacatccaacatttaaaaaagaattttggaaaaacattcatgttggtgatattgtcaaaattaaaaataatgactcctattcctgttgatattcttattctatcaacatctgattctgatggtgcatgttatgttgaaactaaaaatttagatggtgaaactaacttgaaagttaaacaagcacttaaatgctcccatggtgatttgaaatcagttgatgatttagcaaaatgtaaattctggttagaaagtgaaggtccaaaggctaatttgtatagttatgaaggtaacctgaactattatgccaatggtgatgatgaacgtggtgaattgtgtaatgaacccgtcaatattaacaatattttattaagaggttgttccttaagaaatactaaatgggttgttggtattgttgcatttacaggtaatgatactaaaattatgttaaatgctggtattactccaacaaagaaatcaagaatcgctaatgatttaaattggtctgttatcttaaacttcatgttattatttgttctttgttttgtctctgctgttattaatggtgttttctataacaatcgacaagtgtcaagagtgttttttgaatatgctagtttagttggttcccctgctgttaatggtattgtcagtttctttgtggcacttatcttataccaatcattaattccaatttccctttatatttctgttgaaattatcaagacagttcaagcattcttcatttattctgatcttcaaatgtactatgaaaaattagattatccttgtgttcctaaatcttggaatatttctgatgatttaggtcagattgaatatatttttagtgataaaactggtactttgacacaaaatgttatggaattcaaaaaatgtacaattaatggtgtaaactatggtagagcgtatactgaggcatatgctgaaattagaagaagacaaggagttgatgttgaagaagaagctatagctgaaaagaaaggaattgaagatgataaagttgaaatgattaaaatgctaacgcaaattaattctggttctctttcttcaactattcaagatgatttaacttttatttctaaaaactttgcaaatgatttaaatggtgcaagcggtgaaactcaaaaacaagctaatgaaaatttcatgttagcattggctctttgtcatagtgttttaactgaaagatctgaaaaagatcctaccaaatatgagctaaaggcacaatctccagatgaagctgctcttgttgccactgccagagatgttggtttttcatttcgtcaatagaactaaaagtggtttgattttaaatgttcaaggtgaagaaaaagaatatcaaattttaaatattttggaattcaactctaccagaaaaagaatgagtgctattatcaagttaccaccaagtaaaccaggaggagaaccaagagcattattaatctgtaaaggtgcggactctattatttattctcgtttaagtgataaaaatgataaaacattattagaaaaaactgctattcaattagaacaatttgctactgaaggtttaagaactttgtgtattgcacaaaagcaattatcttggtcacaatatactgattggcaaagacgtcataaagaagctgcatcttcattacaaaatagagaagataaaatggaagaggttgcttcatcgattgaaagagatttaatgttattaggtggtactgcgattgaagatagattacaagatggtgttccagactgtattcaattattagcaagagctggtatcaaattatgggttttaacaggtgataaagttgaaactgctattaatattggattttcatgtaacttattagaaaacacaatgcaattgttagttatcaaaacaactggtgaagatattgagaaattgattccagaacatttgaaagatactgtattagaagataaatcagaagttgttaaatttttaattgaaaaatatcttgaagattattttgatatgattggttcattagaagaattagaaaaagaaagaaaaattcatgctcctccaagtggtaattttggtgttgtcattgatggtgatgctttgaagattgcattaagtgattctttgagaattaaattcttgttactctgtaaacaatgtaaggctgttttatgttgtagagtttctccagcacaaaaagcatctgttgttaaattagttaaagaaactttagatgttatgactttagcaattggtgatggttctaatgatgtttctatgattcaagctgcgaacgttggtgttggtattgctggtgaagaaggtactcaagctgttatgtcttccgattatgcaattggtcaattcagatatttaggtcgtttagttttagttcatggtagatggtcttataaaagattagcggaaatgattccatgtttcttttacaaaaatgttgttttcacattagcgttgttctggtatggtatttatgacaattttgatggtacatatttatttgaatacacttatttgatgttctataacttggcatttacttcattacctgttattttcttaggtattatggatcaagatgttgatgattatgtttctttacttgttccacagttgtacagaactggtattttaagatctgaatggaattttcaaaaattttactggtatatggttgatggattctatcagtcaatcatttcttttttctatccatatttcttatattacaaatctggtgttgtttccaatgttggtttgtctcttgatcatagattttatatgggtgctttagttgcttccattgcaattgtttcatgtaattcatatgttatgttaagacaatatagatgggattggttatcatgtttgattaattttctttcaaatatcattttatttggttggacgggtatttggtcctcttccaccgggtcaggtgaattctacaaagttgctgcacgtttatatggtgcaccttcattttgggcatgtttctttgttggttatctgatgtgtgtcttacctcgtttcatttatgattttacatgcttccattttatatcctaaagatattgaaattattcgtgaatgtgttcaaaagggtgattttgatcaatatccaaagaattatgatccaacagatcctaacagaccaatgatatctaaatacacacaatctcatactttagaagcacatgtttctcctgttgatttccctgctcctggtccatcatatagagattccattactggtagtgggggtgctcgtggtaaatactttcagcagaatgttccgtggtaataacaataaattttctccttccattccaataaacccatcacttgaaactttagcaacaggaagaaattgaaatggagtttcaaaagggtagaattaatccagatggtactcttacaagtccgagcttatcagttaaaaataacaaaattattggtgacagtttagaagaaaccagaagaaatatgaatcttaatgatttgaacaatgctgaacatagaggtccaagttttgatggtttgagaactagtctcgatttaccagagttaactaatgctagaagtttattgagtaatctgtcacgttaattctgatactattatatccaatcttcattgtccacatgtattatacgaaatttcatgaacttcattaatgttatttttctttcccaacattaatcttgtttttatttattaattttttatcttaattttatatcattttacaaattacattcatttatagtcataagtttattacattcttttaatattatacattgtaaattaattgaatttttttggaaacagtttttgttctaaattactccaaaatcctttatcgtagatatttgctaagtcatcccaatcatttataccctttaagttgccagcagctgtggtattgaatggtgaatctatcgttgatggttataaagagcggcttcccgtctgccgtcttctctttcaatagtaaaaatgtgcttggtgaattatcatttggtaaaaattggtataaagccttgaattccataaaattatggatatgatcccattttgctgtttcattggtggtaactcctagataaactgaccatatagtctcccccaagaaaaatccaaccaatggaaacaaaagtatgcataatagaaacataattcccgatatttcattagtgaaagttgaatttttaataagtctccaatacttagtaacaccacttgaagtctcaacaatttttggaagtttttctaatttaatgtacatcatcaaactgtaatatgacaagtaggcaccatatatgaaaacaaagcaaactgaacataagaaaataaaaaaccaacggaaagtgtaataagcaacatcattatttaaccagatacaatggtgatcaaacatcaaaatgcatctatcacagctaccacaatgtttacttcttgcaggcttaataactttgcaagttgaacagcttttgtctttaaagaaaagtagaccatcaaaaggaaattcttctaacaatttaacatattgtgttctatcatatggtttctttgtatcaatatatccaggatctgataaaacagccaacaaaaatgaaagatagtttatagcaattgcaggtataatgacaaaatttaatctaatactccagtcaaaccctgttttagatagcttttcaagcttcaatatttgtggaaatgtcagagtaaaaaagaattgaagaaatttagtaaacacagctaaataaaagacaggtattatccagcctgaaatccaacgtatcctcctctttgattgtttagatgtgaaaaatccattaaggtaattcttatcaatgatttcaaatttctttgcaaactcattgaaaattctatcaactaaaataatgtgtgatctatgtaatattgtgcctctgtaatttggtaaatcaccaatcaatacaatcaataaaattaatgtcaagaatatcacaagcgtgacaagtaaataaaagtttgacattgagtttctatatgatcatttgcatggttttcaagaaagaaaaaggaacataaagatacaacttagagataggtggaaattttatttacaaaacagcaaaaaataaaaagttaacaataaaagctgtggggttcgaacccacgcctccgaagagaccaggaccttaacctgacgccttagaccactcggccaaacttccaagttgccttttattgtttgggagcaaaaaaatgttatccattatctaaattactgcgccgcaaagtggctgatgaaaaaactacttacaatttataattttgattttgctaaaaatatttttaatattttaaattatcagtactatagtttttttaaataccaaacaaaaaaggataaaattgtttaaaagtattttttattttgtggaaataaacagtctttaacaataaataaaacgtacaataaaacttagaaaaataactattttttaaactaaataagtatttatgaccgtttttgactataaaattacacattttctacttttcttggctttttttggaggagtgtttgagtttttagctacagatcccttagttgcagctccagaattgttaccagtaacaggtctagacatttgagattgttgtttttgttgaactggaacattttgaattggagtttgttggttcttttgttctggttcattaattttttgtgtttgtacttgttgtttttgttgttgctcaacttcttttcttaaaatctgtctaacaacatcaataaatgcatcatcaacattcattttatacattgcactagtttcatagaaaggtactttattccattttttagagactgcaataccttcctctggttccaattctctttcatctgctaaatcacatttattaccaatcaaaacaataggtatatttgatgtacccttaatacgtataatttgttccctaattgctagtaattcttccaatgacttcttatcagtgacagaataaactaacaaaaacccctgtccgttctttatatataattctctcattgcggtaaattgagcaacacctgcagtatctaaaatctctaaattgcatgcacgaccatcaacttcaatttcctttgagtatgaatcttcaatagtgggatcatatgtatctatgtaaataccttgtacaaattgtactgttaagcatgatttaccaacaccgccggcacccagaacaactaatttataatctgtttaaaaaataaaaataaaattaataatattgcatgttagtaatcatcatcagctgggttaatatgataaatttatatcggatataaaaaacttacctctcattgtatcaattgtgctttttactaataagataacaacaaaggagagagaagaaaagctagtttaaaatatggacccccttacaatcaaaaactcttctgcatgcacttgatctggacacaacagtgaaaaaattacctgcgaagaaaatttacgtgatccgaagaaaataacacgataagaactaaaacatagattacaataacgttagtttagctgatagctattcatataaatataattagatagatttaatttgatttgtttatacagtgtaaataattaactagaagtaatatatctattgagttttcttttcttcaattgatttttcagtcttatcatcatcataggttctttctgcaatatcagctgccttgaagtccataaagaaatgttttaggacaatttcaattaaccatgcaataccaaaatcaagtaacataggttaatgttaatttaattttaaaaatcatatccattggaacaaattgcattgcttcatttaattcagggataaactctgttgatcctgaaatacataaaaatgcaacacctagaataccataatacatacccttattctcatgaatcgattctctaaatggtctaccaatataattaattgtgaatgtactgatttgttgagataattgaattaagaacattgcagtatttaataatgatggttggaaagttttatctaaatcaatttgtggttcacgtggttctaaaatgtaaatttctttagtaatatagataagtgcaattaaatgaattgcaaactgacctaaaattgatcccataatataaatattgaaaataccaggttgaggtctttcctttgataatttttcaattgacttacctcttgaaatagacataaaacaaacagataacaaaacaccagaaactgtagcttgtgcatcaccaaatttaataccagctaaatataaaacagataaggaatatgcagaaattaaacaattcaatgctaaaatcttatacatttgaatagttgcaaccaatgcacatctaccttgtctaataacgtttaaaacagttgaaacattagctaatttagaagtaaatggagcagcaacggaagcatcacctaattttagtactggtgcttcttcatcttcttgagattcttgtaaacttgctaataaagattcagtaacattgttttgcttattttcagttgatgaaacagttggagtagcagcttctgcaagtttattagcaagtgcaactttttctctaatttcatcagtaataacagtaccatgttgttctaatgcctttaaataatatggatttaatggtccaggtggatgtaaatgagcaatttgaacaggatactttggttgtggttggttccatcttttcattaaatcacattgtttttgatacattttttcaaaactttcaatttttctattttcttgcattttctttaaagattcttcagtaccatttaataatgcaataccaacatttgcttgtttaagagcaccaacatcattagtaccatcaccacacattaaagtattataacctaaacctttataagtatttaaaatatattccttttgagatggtgaaactcttgagtaaatccatgaatatctaattaaagtctcaatttgtggatgatcaatcagttgttcaagtgcataaccagtaatacataaatcattttcctttaagaatttcatatcaaacttaatgtctttattaacaggaataactctagtttcattaacatttttccattctaatgaagaatctcctgaatgatttttttcaggtttatccagaattaaaacatctttagtaataataccaacttcctttgcaacatgacaagcagttaatggattatcaccagtaatcataacacatctatgagaagattgatttaacatttgaatagtttcaactgcatcacttttcattggacaatggaaaacaataaaaccaccaaaaatcaaatctttttcaactgaacttctttcaattttatcaagatttttatcattttctaaatatttataagctaaagctaaaactcttgaaccattcctagtgaaatatttataagttgattcataatctgatggaacatcagttaatctttcataaatagtttctggagcacctttacaaccaaccaaaactttattattaactttggaaataacagaagatcttttcaaagatgaagaaaattggaatcttttcagaatttggatttttttgttacttggaccaatcatttgatttttaattttatcatctaatttccaaccagagactttaacagtttccttttccattggatcaccaacaacttcaccatcatctaacttaactaaagcatgaacagaacctaataaatcaattgtaacatctggaacttcctttgaatcacatttagataaaatagtttgatcatttgagttgaaacctgctaaaccttcaaaaaataaatcttcagcagttaatgtaccagtcttatcgaaacaacaaacatcaattctaccagcaacaggaattctgaaaggttcagtacaataaatataatgttttgctaaagcagctaaagattgattaacagccatagttaattccattggtaattctggtggaacaacagaagttaaaacaataatacaatcaagaattaattttgattgttttctacccattttagtaccttcaatccaaacatatcttgaagcaataattgcaaaaactaataagaataaaataaagaaaaaagcttctttattagcaacagacattctttcagatgagaaaatcataactctaactaatgaaccttgagttgtttcaaaacctgttttggtaacaacagcaatcgcaccattgtcaggagctacaggaataagagatttagaagttgatgaatttgtacttctttcaggaggggtaacttgtaaacatgaagtaccaccatgtaataaagaatttttatctaaaccatcaggttgaaatgtagaatcatcttctctattttgaatactttcttttaataaaggagttgattcacctgataacatagcttcattaacaatacaggaaccttctaataagaacatatcacaaggaattgataaatcttcatgtggagttctaacaattgagacaacatcagcaggtaataattgatcagttttaatttcactccattttttatctctataaacgtaaatatcataaggtttaatacccatactttgaaattcagtcattgttgattttctttgataaacacttgtagcttcgaatgaaaataacataattaacgagaagattgataaataccacatttcatccattagccataatgatattgaaaataattggaaaacaaagaaaggagctaacatatgttcaatgaataattcaacgaaagttggaactgggatatcaaaagtatttaaaccataataagtttgcataccaggaataatattacttgaaaaacctgaaatccctttcaattttttgattgttaatttttcatcatcaatgtagaattttaaaggtgaaaatgttttagattcaggattgtataaaaattttcttttttgatatttgaaggtaatttgatggcttgatttttcaattttacaaatttcactcaaaccaaaagaagcttttgccttcattaaaatataacaagaggaattaaaatctgaaaatgaatcaactttattatattggaattgaacttttaaatctaaattccatcttggtaaaagccaaattaaagcgtgagttgaacataataataaagaatagataaaagtccattctttacccttgaaataaacatcataataattttcaaataaataatagtaagcaggataaactataaggaaaggccaaacgtaaggtttaaatattgttgattttggaactaacaattgagagtattcgatagtatcagtatcgacaattccacgtataaccaaaccttttggatccactttagattgagcagtggcagccattgttgattaatgaattagaaagttgtaaaaggattataaagtattataaaataatcaaaataaattaaagttttctgtttaagataatcaacgtgttatctttaaaaaaacggattttcaagtggcaaaaaaatgaatggctacatttttcatgttgaatttgaagaagtggacgataatagaagggacgcgtttatttgatatctaattacgtaagattcacaatatattatgagctgaacgtattgaattgacaacttcctgtggtgatttacctcttaattgatcagcaatgattgaacaaatagaatctatgagtggttctatatcaagaaaattagcggcaattaataaatcttgtaaataagagctatccatattaaggaaatcacgttcccaattatcaagtattggagatgtttgtgtacttatatactcatcaagtgaattatctgaccaagtacccgcagggatattattgtaactcttagaatgattcattactactatcaatattattattaaatgctttattagtttcaagataatgattgcaccacgaaataattaatttcatggtttcaggtgtaatattatcaagtgggatatcaattgttggacttttaccattggcagtatgtttattctcattcttactctcattgtcactatcactttcactatcactattatcaccatttacctcaaggttattaattaatttggatatatagccagaaactctaagggtattagcattggaagtgagcttctcaccatttgcaaacaccaatcttactgtagacattgttatcatatgatgcagaatgataatgaaaaaagataacaataaataataaacgattatattatataacacaacccttctgtcctactgtagtaataaatccatcagtaaaaataatcataataacttgcaatgagcctccaaggcacgtgacacgtaagtctataaaggcagctcacgtgacattgcacaatttaaaaaattattatttcaaactccacaaaattttaaagtaatctccgtttagtggagagcaaaacttcccttttaggttaatcctgtagatctgttttaatagtttgaactgtgcaagtttcaatcaatcttatattattgtaatcttataccagtgcccaatcttacattatttggatcctttcaatcaaaaggctataataatgcgttagtaatacccgattcattttactacaatgttattaatcaacatcctttgatttgtatctgctttgtacttgctttttattaaaactatatcttatttagctcttattatttactgtaatctattcattaccttaatatatacaaccctcactacatattgatgccatcatcagctacatcaacaccattaccaacatctattgatctcagaaataattcattttcactaaatagaagtcgtaattcctcaacttcttcaacattttcaaatacttctcatacatcatataaatttaagacaactcataaggataaaactctatcattacaatatgatataactactgaaaataataaaattaataaatataaaggtaaaataagatctttagaaagtgaaaatgcttggttaagaaaaattctattatcaaattgggatactgacttaattgattcaatctcaaatagtattgattatacaacttcaaagcatgtataacaagaacaactgtctcacctctcaatacccaatatttttatagattctcaattgtataatactttcagaaaaacacttcatactaattcacatattcaatgtaaatagttttattaataatggtttaaatagaatgtgctataaatctagattataaatgaaagaaataaaggaaataataaaaatattagaaataattgtagataaaatgaaataaaataatgtaggtataaaaatgaaaaaaaaacacacattctttatgaaaatccaatcaatgtcacaaatttcaaacttgttcaataattggttcaatattccaaatattttcagcatattcttcaatacaacgatcagaagagaaaaatcccatatttgcaacacttaaaactccctttttaacccaattttcatgatctttaaattctttatcaattgtactttgtgcttcaagataactttcaaaatcatctgaaactaaatagtaatctccatggactttagttgaatcaatcaatccttgatattcaccataatctccaaatgtacccttagataattcattgaaaacaagtgttaatgcatcaggaatttcaattctacccatttgatgatcatatcttaaatcttcaacatcttctgataaattaccaaaaaggaaaatattatcttcaccaatttctctagtaatttcaacatttgcaccatcaactgtaccaataattaaaccaccattaagaacaaatttcatatttgatgtacctgatgcttcagtacctgcagttgaaatatgttcagaaatatcacttgcaggacaaataatttcagccttggaaacattataatctggaatgaaaacaacttttaataaatctccaatttctggatcattattaacaacttcaccaacagaattaactaatttaataatcttctttgctgcataataacctggtgctgctttaccaccaataatacaaacttttggtaaccatttagcttcacgttcttcctttggtgttgccttaatttgtaaatatctccaaataataccgaaaatattcatttgttgacgtttatattcatgaattctcttaacttgaatatcaaataaattatgtggattaacatcaatattagttaatgatttaattaatttggataattttactttattgttaaatttaacttcatcccattttgataagaactctttatcattaataaatgattcaagtttctttaataagactggctttgttaagaaatcatcactacctaatttttcgctaattaaattggttaaatttggatttgcttgttttaaccatcttctaaatgtaacaccatttgtaacatttgtgaatttttcagctccataaattttaacaaaatctttaaaaattgttgttttgatcaattctgaatgtaattctgcaacaccattaactctatgagatccaacaattgctaaatttgccattctaatattttttggagttgattcctcaacaattgagacccttcttaataaatctctatcatttgggaataatttttcaactttttgtaagaaaaataagttaatatcataaataatttctaaatgtcttggtaataaattaccgattaaatcaactggccatttttccaatgcttcttgcataactgtatgatttgtataaccaaaagttttagtaacaatattccatgcataagaccattctaaattttcattatcaactaaaattctttgaagttcaacaactgctaaagttggatgagtatcatttaattgaattgcaactaaatcaggaaatttatcccaagaatgttcagttttcaaaaatcttctaacaatatcatgtaaacttgctgcaacccaaaaatattgttgttttaatcttaattctttaccttgataaaaattatcatttggatataaaactgcagtaattgattcagctctttgttgttgagcaactgaatcatcataatcaccttcattaaatttttggaaatcaaattcagttgttggttgagatgaccataatcttaaattattaacattatttgttttaaaacctggaattgggaaatcataagcaattgctaaaactctttcaccacctaaccattctttctttgatttaccagttttactatcaattgttgtttggactgtaccataaaaatcaattggaattcttatttctaatcttggaatttcccatggattaccaaatttaagccaataatcaggatgttcaacttgataaccattaataattttttgtgaaaaaataccataattatatcttaaaccataaccccaaccaggataattaccagttgataatgaatcaataaaacatgcagctaatctacctaaaccaccattacctaaacctgcatcaggttctctttcaataatatcttctaaattaaaacctaattcatcaacacttttcttacataaatctttaacatttaaattaatcattgcattatctaatgctctacccattaagaattctaatgataaataatataaacgttttgtttctttaattgtatataattgttgagttttattccattgtaaaattaatttatcacgtaaactatttgataaagcttgataagcagctaaatcatcacaattatacattgatcttgcaagtgttgtttcaacatgattaataaatctatcttctaattcttcttcattagtaaaaccagttgtggcatgttttgcccacgcagttctacatttaacaggaattgaagcatcaatatttttaatttcagttggggtaaacccagtcattgtacgtctatgtttacctctaacaaaggcattggagtcaattgaaggcatcatgattactagagtattaacaatgtctttcttggtcaaaagaaactaaagggaggtaaagaagaacaagttataaagaattgaagaggaatcaatagtcagcccatccatttaaatacaaattaatcaattaatttattgttatcaattcacatacagccactccgaaaatttaaattttgacatccggccctattgcatctcctgatacccatttatattacgtaatttactctattatatcctatatattctattcttctactctatacaatactaccatcttcaaatactttaccctttacatcgtgtaatccctctccagaataactggttaatggcgatacttcaatgagagcaccctctttaacttctcctccattcgctatgatccatttagtacttcttttcagacaattcatacgacacatctctggtgaatcacttggtgatccaggtgcattctttaatggactaaattcatcctctcttgcaacttctaaacatccaaacttatttaataaaacacttggaaaaacatcaaaaatgaactgctccattttaattaccattaggttctgtaggttgtataaatttatcagttgtagtatcaatacatgatatcttctttttagcaatatgatatggtaaataatttcttgaattaatccattctggaaccatcttctctaaaaattcaactttataataatgattgacaatatttgcagcccttaattttaataattttggatcatttgaatcttttgattctgctaattcattagaaatttcactatattcaataacacatggaacattgttggttttatctagtacaattaatccaactttctcacttggttcattttttctaacaactttagttgcaacatcaaaattattaattgctgaatatccaataaataatggatctccaacctttactaaaatattatcaatacaatacatatgaatatgttctatccctcttgatttgaaatcttctaatattgaattatcatatagtgctttatataatccaccattcccatcaggactctcgactaatgaacatttatcttctgcaagtaataattttttaccttcaagatcaacagctggtaatgtaccttgattgaaaaatacaatttgattttcattccatccaaaataattcattttctttaaagaaatcttcagtattcttacgtgtagggcctgatgtcataatatagagtgttaacacgttatgattattttcatctctatttgctaataattctaattttctcattctttccacttgaatctgaaataatgatttatgtgatggtaatccaacatcataacatcccttaggtgatgtagatccaagtcttgtaccttgaccacctgccattaaaataataccaactttaccatttttgattaattctaaaccttcactttcccattccaacaattgttcagttgatgatgtaattgttgaattgaatgatgtttcaggtaattgtgtatactctttagcacttgaaatattagaagaatattcaattgcattagaaacatcatttataaatgattgtggatcatttattttagataattgatttataaaattattttgttgagtttgatctaattgttcccaatatttgaaaaatatgagattgacccgcattttcatatttctctctaataacactactcatttgttgttgatgttttatataccccaatacttagcaaatgaaagtaaattacagaagaacaataaccaagaacacgtaaaagtcctataattttgaaaaggattgactgattttctccctctctataacgcatgttgctaaaatttcatgaaaccagccttgttattcgaaatgtcaacaaaaaaggcttaaattcacggatcattactatttttaatttaattcattaaaaaatatttacaaataagtaattgtttactacttttatttagataacttctcaatgatgtaattagcctctctttcaccacttatatatgcaccatgtgcacatgaatgaccttgataaactggcccttcacctgcaaatctaatactaccaaatccatcaattaatgcatcattaacgaatttatcacctggtgcacatgtactgatagcacctcttgaatatggatcattaccccatgatgttgtaagaattaatttaggttcaggaatttcaatatctttaccaacaattttagaaataattggtttaattaagtcataaccatatttttcaggatccgatgcattttcaatttgatatgctggttgtgatggtaataaaaacatcaatgctggaatttttctaacagaattaaaattagaaactaaacatgggaaatcaaatgctttaacattttccttatcagtatagttaccgaactctttaacagtttcataagttttagtaatatctaattcatcatcatttggtactgataaaactaaaaatttatcattatcaggccaaaaagctttatcaaattcaacaataactttagcaagtggaagaaatttagtctttgcaaaattatcagtaattggctttggcaatggtggattgaatgtaattgcaccttcttcattagttttatcaatagataattttaaaacacctaatggaattgtaacaattaaatattttgatttgtaaattgaaccatcagcattagtaactttaataattgtttcatcagccttaccaacttgaattttttcaactgatttaacaactttatttaataaaacattatcattagggtaaccttcaattattttttcaataactttatcataacctatagtattaaatgcatctctaccattaaatgggccataagaaaatttagaaccaattgtatcccaatcgcaaccatttaataattcagcaaatttaaataaagcagtagaatatttaatttcatcccttgataaacgatgttgtttagttttaaaatattcaattgcacaattatgcaatgaaatatcatccttcaaatttgatgaataatatttcatttcatcaacaattgcaccaacattaataccactaggtaatgagcctgtttcactattaataattataccaacattattatcatcatattttgcactttcaatttgtgaatttgaataccaattatttgtaaatttatcaaaaattggattttccattgttgaatgaaaccatgatgcacctaaatcataatgattaccagtgactgtatcacgtttagtataaacacgaccaccaattcttggtcttgcttctaatattaatgattttaaaccttttgagtgtaatgtagatgcggcattaagacctgcaatacctgcaccaataattataacatcggtatcaacttctgacattgttcaattgaagattagattagaaaaaaggaaagagtgttaattgaatgtaaaaaagttccataatattaagtgatattcccacaataggtaatcgttacaacaattcgattattaattttattatcaacaaattaatgttgggtaaaatatacacattttaggaaaaaataccgacttaccagtactaaatgtttaatagatgtttaataaattttaagagtaacgataaatgtaatacaagttataataaagtaattatacaataaaacaacaaacagtatattgcaagattaatgagaacctgcacctcttgaaactttttctaaaactgattcataagaaacttcagagaaatcagtaccttgaatatcagttgagacaccattaagagctcttcttaaagcatcctttgaagatgcataaaccatctttgctctaattgaagcagtatcaggagaccattggaaaaagacaattttagatcttttaccttcacctgcactaatttcatattcaaaatcataaacagcatatttacaatcattttctgggaattcttctaaaaatgcatcatatgaatcgttagttgaagttttgtcaacaacaatttgagttttatcatcacttagtttgtaaataacgtatttatattttttacctaatttaaggtcattaaaagcttttaaagcttcatcagaaattgcaacactgtaataataaaggattaataataattaattaatgttagtatgacttaaattcaattcactttattggggtttattggtttacttcatgtttgaaatataagattattaacatacccagatctagactgtacaaatataataaaggattgtgagataattgataagtcaaccaatcattcattcaataaaacatcaatttgattgatttcaaacatgtcatcaaattatgaaatgaaatgaattgattatcaatcatcattagagccattgttgattcaatgggggtataatatgttagtatttattcagttttaagtagttacagacatccaatgtatatagtatacatatacataccattatgagttaattgttgattaagggaaacaactaaaagaagaaaagggtgggggtggtcagacaaactccaaataatacagtaatccctatatgttttgccactgtcagaaaaactcaacttcgtcgctgagaaaatgaaatgagatagttggctttatctgataagtatatattattattaaataggacaatgagtagtgatagtagatgtagcaatgggttgtcgttattgaaaactcgtgtctctgtgttggaacagatttggagtgggttttctgctgatcaattggagaatcccgttttattaaaatatccacttcttgctacacatgtagatgatctctgtaagttacttaatcaatgtcatattgatgatattcagtattactacagatacaaatgaagtcagtaatgataaagataatgaaaagaatattatattggaaaatagaacattattagtactaatcactgcacaagctgaaaaacttgttgatgattgttcaccattattagattctttattaatacttactaaacaacttactagtcaaaatgtggataaagaaatttatttaaagagatttaaaagactatacgatcatttcaataatatagtacaacgattaacattactcgtacagaagagaatggttttaagaagtaaaatagctcgtgaattatagtcgaaagagaacagaacttcaaaaacgcaattttcaccaaagttacatacaaattgtatttcatacaattaaaactgagtctcaaaaatagcgtgttctgtaatttgaaatcagcataataaattaacattttatcatataatgcgtattttaacaggagtcttgtaaaaaattctgtaaaactgtcagaggtggtggtgttacaagagaagaaggttgatactgtatattatagtctatataatgttctataaaaaaaggttcctatacaataactcctgatccgagtaacatatcatctttatacaaggccaaagtttgacctggtgcaacaccgaaaattgattcatttattttaaaacttactttaccagtattattatcatttactttaatatctaaaactttattagattcctgtaatgaccttatttgacaattaatattattatctttatcaataagtaatttttcaaatgataaatctttttgcatccaataccaatttttttcatcaacattaattaaatttgtataaaatgcatctttatcatctttcctagaaattattaattcatttttttcaatatttttaccactgactaaccaaactcctttatataatggattaccttgaggcattgaaatacctgatttttgtccaattgttgcactccataatccattatgtttaccccaaattttaccatcttttgtaactatattaccaggatttggtggtaaaaattcattaagaaaatctttaaatttcccaatttgtgaaacaaagcaaagtccttgagaatcaggtttatcctttgtaattaaattataatctttagcaatttctctaatttcaggtttactataatgtccaattggcattaaaacatgattaagtatattatttggcatacttgtaagataataactttgatctttacatttataatcagctctaaataaattaaattcttttgtttcattattttgaagtattctactataatgacctgtaactaaccaccattttttatcattattcatattcatattacaattattgaattttttatttaaatattcaatcattttaccaaatttaacatatttattacaaccaatatcaggatttggtgttaaccctcgttgatattgatctaacattggttcgaaaacttgagtccaataatctttttcaaaattaactctttcacaaggtatatttaattgtttacaagtttctataacttgtaaccaatcatcatcaacagtacatttactatttgaatttataattttatcagaggaccaatttgccataaatataccacgtacattcttatattttttagcaaacattaaagcagtaacagatgaatcaacacctgaagacattgaaattataatttcatcattttccttaggcataacttgagtgtaaccctctatagtggtggttttaaagaacctactatccactcccacactactataccatcttcctaaacgatattcctctcatcatcatcatcatcttcatcatcatgataattgtccactgtccactctcctataaaccacacatcacaaaaaacatgtcgtgaaaaattagtaatagaaagattaaaaaatttaaacctcgcctgactttaaagattaatagaataagcgatggtggtggtggtagtagattgtggaagtgttgatttaacttactccttatatagtggtttcttttatttatttctttatctcttcttcttttattaactcaattgattatattaagaacaatgtcatcttgtaaatcttctaattcttcaaataaatgttgtggtggtgcttgtttaactaaaaatagttgtaatttattaacttgggaaaatcctaaaaattctgcaattgttttatcatcaattttatcatcattattattaattaaatatgttaatttattagcattatttttccgtttatcaacttttatcttattattttcaggtttagcagaatatttaggtaaatcaattactggtacaggtttaattactaaaattaaatcatcttatccaaaatttaataataataattttattggagattttgctgaattttatgctccacatgcagttacaattttaaaaaaatttgaaattaatattaaaaatttatatacttcagttaatattgaaaatactattaaatcaggtgttttatcatatttaatttataaaattacaaatattttctcaatttggactttatgcttcatttcaacaattatttcatttactgcaccaaaaatttatttattaaataaagaaattattgataaaacaattttagatttatttgaattattaaaagttaaatttaataaattatcaaattcaattaatgaatcttatggtcctcatattgatgctgcaaagaagaaaattactccaattattaaattaattgaatctaaattaccaattagaactgcaggttcaactgttaatgaaccaattattgaatcttcatcaactaaatcaactactacttcatcaaatattattgatgaatcttcaaatattaaaaaagttaatcaatcaattaatgaaactgaagttgattttaatgtattaggtgaacaattaaaacaagatgcaattaatgcaactaaggaagcagatgttttcactagagaaaaagttgatgctccagagaagttataattataattatatgataaagataaattcttctttttttatcccaaattctcccttatttcttatttataaatgatattactttattactttataactattttaaatatattttttttcacaattcttatttaataaataaattcaattatcaaaacttattcgatgggacatgcatagtgcatttttaacatgatactttcactagctgcaaattagaatgtaagatagtatagtaaatagagattaattatatagtaggttattatatatataatggttataaatttgattagatatatatttgattagatagatttgattgatattggttgataaggtgtatttaatataatataattataattacataatagtacaacaaccaccaccattttcctttgcgccagcgcttggttttgaagaagtgttttgaacatattgtttattattattctcttttgaattattattatcagaatttatcacatttgatgaagtattattgttattgttattattgttaatagtattagtgttattttgattatcagtagtatttgtagtattgtttccattaaaggatgaattaaaattcttattattattattattattaatattagtattatccctagtattcatctcattttttgaattttgttcaattaattttttctttgattcttgagcttttaattcttccattttatttggatataaagtattttctaatccaatacccattaaatcaccatacataaccattttaactaaaccatgaaatgcttcaacaacatttaaaccagttttagcagaagtttcaatataagcacaattaaattttttagctaataaaattgcttcttcatgagatacttgtctttcatcaattaaatcatttttattaccaactaacatcatgggcacaaattgtacagtttcacctttaactctaataatttgattataaaaagttgaaatttcttcaaatgtatgacgatcagttaatgaaaaaactaaaaggaaaccttcaccagttttcatatataaatctctcattgaagaatattcttcttgacctgcagtatctaaaatatccaaagaagcaggagtattatcaatattacaataatatctataagaatcttcgattgttggatcatattcatttgcaaattcactttgagttaatctgattgttaaagcagatttaccaacaactggtggtccaacgactactaatctaaattctttagcaacagatgacattatcaattatctttcaactatgttttgtataatagtaattgatattataaagagagaagacaaaagatgaaagaaaactagaaattaaaattaaaattaaaattaaaattaaaattaagaaaacagaaaacagaaaagtattctattctattctattctattctattatattccattacagcaataatattatttctttccattatattatggacaaccttagggacaattttaattccaatgtctttttcactctttttcactctttttccccttcgacgcgccgccttgctgttttaggaaattttatttttttttctgtgggagctttaaattatttaattttttaaaaattttatttttttactactgaaattttttttaatctctgttctgatcttatagtaactgctttaaacaatggcaaagactggttctaagagatcggctgttggttcagatgttgtttctttgaagaaacaaaagaaagattcaaaggctgtttcaaaaaaatctgataaattaactaaatcttcaaataaaattactttagatgctagaaagcaaataaaagataatcaaaaggaagaagatagtcatgatgataataatagtaatgatgatgataatactgataaaattgtcgacgatttggataatgaatatggtgatgttgcagatttattagaaaaagctgacgatgatgaatgatgatgaagatgaatgatgaacaagatgaagtagtagaagatgaagatgaagataatgatgatgaagatatgaagatgaagaaaataatgataatacaaatactttggatgaaaaaataccagataatactccacttactgaaattcctcaaaattttactgatttagcattatctgctccaactcttaaatcaattcaaaaaatgggtttcactaaaatgactgaagttcaatctcgtacaattccacctcttttagctggtaaagatgttttaggtgcagctaaaactggttcaggtaaaactttagctttcttaatacccgcaattgaattattatattcacttaaatttaaaccaagaaatggtactggtgcaattgttataactccaacaagagaattagctttacaaatttttggtgttgctagagaattaatggaaaatcattcacaaactttaggtattgtaattggtggtgcaaatagaagacaagaagctgaaaaattaatgaaaggtgttaatttattaattgcaactcctggtagattattagatcatttacaaaatacaaaaggttttgttttcaaaaatttgaaaactttaattatggatgaagctgatagaattttagaaattggttttgaagatgaaatgaaacaaattgttaaaattttaccaaatgaagatagacaatcaatgttattctctgcaactcaaactactaaagttgaagatttagctagagcttcattaaagagaagacctgtttatataaatgttcatgaagatagagatttttcaactgctgaaggtttagaacaaggttatgtggtttgtgattcagataaaagatttttattattattttcatttttgaaaagaaatttgaaaaagaaaaagaaaataattgttttcttttcatcctgtaattgtgttaaatattattcagctttattaaattatattgatataccagtattagatttacatggtaaacaaaagcaacaaaagagaacttcaacattttttgaattttgtaatgcaactcaaggtattttattatgtactgatgttgcagcaagaggtttagatatacctgaagttgattggattttacaatttgatccacctgatgatccaagagattatattcatagagttggtagaactgcaagaggtagttcaggtaagggtaaatcattaatgtttttaattcctcaagaattaggatttttaagatatttaaaagctgctaaagttccattaaatgaatatgaattcccaatagataaaattgcaaatgttcaatcacaattagaacaattgataaaaaataatttttggttacatcaatctgcaaaagatggttatagagcttatttacaagcttatgcatctcatcatttgaaaactgtttataaagttgataaattagatttagttaaagttggtaaatcttttggttttacagttcctccaaaagtgaatattacaataggttcaagtgttacaaaatctaaaaagaaataataattcttatatcttgatagtaatagtaatagtaatagtaatttaatttaattatatttttattatattgtatataagttgaattataaaattaattgtaaatattgtactgtatattttgtaagtatataaaaactgaaatttgttgaaatagaaaagaattaaatgtaaaagtgaagaaataatataaaattaaactaatttcttcccagtaatgttaaaaattcatctcttgtcttttgttgtgatctaaaacatcctaacatacaacttgttgatgtaattgcacctgatttttgaacacctctacttaccatacacatatgggttgcttcaatgacaactgcaacacctcttggttgtaaaatttcacttaatgcaatcgcaatttgttttgttaatctctcttgaacttgaaatcttcttgcatacatttcagctaatctagctaatttacttaaacctaaaaccttcttatttggaatatatgcaatatgacatttaccaaaaaatggaactaaatggtgttcacataatgaataaatttctatatctttaacaataaccatttcatcatgatcttcttcaaaaactgctcttttaataacatctttaatattatcttcataacctttagtgaaaaatatcattgctcttgcataacgttcaggagtttctaataaaccttctctattagtatcttcacctaattctgttaaaatagttctaactgcattggcaattctagcttctctacctaatgattcctcattattggattctaaacgttcacgtgcacctaaacttggccatgataaaccatcagaatcaattggaggatttaatgtataaggagatgcaggtctagtatttaatggaacaccagaaagttttttataccatggttctctttgaggttttggattagataattcttcaactccttcaccttgttgaatattttcttcaacattagtttgattgtcagataatttcatagttttaagtttagcgtcaagatctctgtccatttgatcttttctatacataacagaagcctgataaacaaacaaccaaacaagcaaaaagtttaaaacagatgaaaagttcaaagagtcaatttttttcatgatgataaattaaccagtaaataatttgaaatttattctctgcgtctttttacatttaatgtaattattggcatgtgcattgcatgctttcttttattttactttactttattacatagatattatacgtagtgtattatgcaatataagtatcagttacaatatgtatacactgtttaacaactgtgctgtcatttggatgaaattcatcatccttattaccaaaaattcgtccacttatatttaatataatattcttattagattcctctgacattactttacctatttgtgaagctaaaacttgtgtctttatgttattaccagctccaattaatacaattggaacaattgtactcgtagatgaaatatcatcattatctaattcattatctacttcattatttaaatcatctatttgatatggccttttgaattcattttgttgaggtatttgaatatcatatgaaatatctgtctctccatctaatgataaatttattatgattttatcttgaaattcaagaattgtacatgttaacattttttcattaccatcttgttgtttaataattaagttagattccttaactgtattgctaaattctcctgtattagacataataaattttttctacacttgaatctatacaaacgtaatggtgaagtaaattctattaaaacttttacatttctatacattgataataatgataatgatacaagtaaatttaattacttactatacctcgagaagaaaaataattttcccacacattgcactaaaaattaaattataacttgatttcaccttcttgaataactgctgaatcaactaactctagcttacctttcattgatttaaccttttcacctaatggtttataattctcaggttctaataaaaataaaatttgtgtattatcatcaacaatttcactattttcaagaaatgaaatgaattcattctcaaattctgatttaactttattaaaagtttccgtatttaatataactttaacccttaatttagctcttgcaattggtatgatttgcttttcaactaataatttaatagcttccaatgattttgattttgcacttcttgcattaacaaaattaaattttaattctttaagagctttatcaatcattgttggtggatatcttttcttactctttggattaatacatttagctgatattatatttagaatttctttatgtaatttttcattttgttgagctctctccttctcacttaattgaatttcacccttcttcaaaatttcaagtataatttcatcaatatttgttgtattaaatgatgctttcaaatcttcacttgatgcaatttgacccttggaaacattaagaaaaatttgaggaatttgtaaaacttcatcaatatttttttcaactcctgatcggaaatcatgaactttattttgataacatgcaatttcaaatcttttcttaccctttttcattcgcacaagggaaacattagttagtctaatttgtgagtttggttgattgattttacccatttatgtaattgtaatttaattgtcacaaaagaagaagaaggttcttgaataatgcaaatgaattaagataaaaaaaactatttgtaagggaaaatttaaagtgtgcccctatataaaaacgaaaattcaaaaaaaattataataattaataggtcgtacccggattcgaactggggttgcccggatcaaaaccgagagtgataaccactacactatacaaccaattattagttgttaattttgctggttattttcgtcactaatttttcaaggtcacgtgaattttcaatttttcaattattttaattatttgttgaaaaattcgaaagtgtacaagattttttttttaactgttgttattggtaatataaaaataattaatttaaatttgccatttgatcaaagttagataaataacaattcaaaataaagaagaatcaaacagttaaatttatcaacaaagcattttttaattatttacatctatccttagtaatactacatagataagaccccttaaagaatcaattttgattgagtttaccttactgtttgtgtagttcacaaaatagtattattgaaattggaatatcggaaatgaatcatgtagagattagctaaaggtcaaaaataatgattctgaaattgaagatttaaactaattgttgtgataaacaaagtttcaaatttcaaaagtgactcagctttgttttcattggattttgtggttgacaatcttaaatcattgatgagcacatcttatattaattaatgcttctatttttagttagtatttattttacgccttggttcatatatattattacaatatatatatatgatttaatagactcttgttttagtcattaacctagattaatatatcaggttgataataaaataaagtgttcatttaactattacattaatacagtatcgttttagtagtagtaataaaaagctgtattcaaattattgaaaaaaaatatttatttggtagaatcactagtttagacttttaactacaccaaaaaggtcaattttatctaaatcttttgttatataagatagctacaagttaaaaatgcaaagatcaacgactaatatactataaacacaaaaaccaaaataaaatattttgtaatgtacattgataagacttttgagctttcaattgtagaatttctcgtcactgtgctaaccaactagttactgtttttcctatatataattttgatggtataataatctaaaaaaattattaaaacacaacatagctgattatttatcatttactatagaaatgtaaaaatatacaacttccaacttctggattcaaatgttatacaaatcaaacctattataatccttttttttcaaggttacaaagtataattttataataaaattatttaacaaaaaataacaggcaattacagaaaattgatgtagtattcctttgagaattttggtagttgatctgattatgacataataataaactttacaacgcaagaaaacccgcttatttaaaaatactaatgtgggatttcaaatcaaaaattaaaatatataattaacaacctctacataattaacatttatcatcgttaggaattctttattcaatattgtaataatatttctcggaacttaaaatttctggaaatctttcaaatctgacatgaaaagaaactttaaattttgtgagaaatttaagttttttgctttgcaaattaagctatatggtcgtatatacagttcaagattcagctttcaatttcaaatttatataccttcaataccttaagttacatatagacaagcatacacctgctgtttttcttttaatcctgtattactgtaaattattaatgtatagtagtttgcatatgtgttcatgataacaataatgaatagatttaaataataataaataaatggggcagcttgagtatcatacgagtaaaacgttcaacccctgataattgatgaaactgtcaataattatgaactctctggattttggggccaagaaaaaaagacttgtactgcctcggcaaaaaaataatttttagtgataattaaggttgtaagtatgataataaagctaaaaagatttttcttaaggcatcgattcaactaattttccggtttcattgtgcaaatattcttgtcaaattatccaacttattaatggagttgaaaataatatcagccataaaggtttttctatttaaataataaagcttcaataaaataactgtaaagacagaccactttctaggaacgttcccgttttccccttaacggacagaataaacattttatgatggaacacatattaaaatatgtatttcaatatatatataattagattcttcttgaagactgtccctgatattatgatttattggaaatatgtaatctatacaaaagtctcttgtttaataaaagttcaatgtagtattcatcatcaccaactaatttaggataattcaggttgcatattaccgaacaaagtgcggacataaataatttattttaggaaaaaaatagatctgtaactaaagggtcccccaggctcaggatatacacgattttatttgcattaatttattattccaacggtattttttacaaagaaatattattttttgaatcgagatacactatttttttagttgaattattatttaagtgctctttaccgagatttcatattttgtatacaattcaaaccttatcaatagttcctaatatttacttttcgagctcaaatattcaaaaacacggttttacaaagggtttctattattatttatatttttgagttgaaagtttacaattcgtataaccaaagacagctttaatcatgggctttttgccgaatattacgttgtagttgaaaagattttatgaccatcaccttgaatatcttgaagatatcatatgtataaatagaaccaattccttcttaaacttacagtggtttagaaatagttttttattataaaacttattattttttataattctttttaccaaaagcaagtttgtcactcactatgttttccaactttgcctttagtgcagctatattactgtcactttttcaaacaatctcagcccaacgtaacgtttggtctactactgccaacgggcttggtgcttcaatccaattaaaagatactgctgcaacagaaacaggttttaatgcaaaattctacagttatcctgctcttgacttcattccattttggaatgatgattttgttgctgatggttattcaactagacaaattattactagtgccaatggtattactgatccaaactttagttttgattccaatatgcttaacgagcaagtttatggtttatacaatattgatatgttcaatgttttgattgaagttgaaaaggttattttaaacgtatgtattagtttcaattttttttgattcgttattctatccaatctttctgatcaatatactaacatttatctatttttcaattcttatagctaaaaattctggtattcatagagtttccgttaactatctaaatgatggtggtttcatttggatcggtgatggtgcttttgactcttgtactcaaacctggtatggattcaacttattctgatgttttattaggtgtcagagataatggtgctcattcttcttttgtttatcttgaagcggataattactatccaattagagttgtttatgttaatgttcaaaatgcagctgttatggaatttcaagtcattgatccaacaggttatgtctttgatacttttgaaaatgttgttaattttgataaatctaatattcaagcttgtgctactgttagaggcgccaattcaatttctgtctcaacttcagtttcatttggcgcatcaactgcatcaactgaatttgccgaagttgtccagaatgttcccggtggtcaatcaacctattttgttgaaaacttatatcttccagatcctacatcaactagatctaccacaataactggtgaaaaatcaactcaatatacgactacagaattggttactgttgacaacaacgttgttccagttgagttatttgttaatcaagttacaggctcaacccctacaaatattaattcagagactgatatatcgactacctctgctacaccatttgaaaatcatgttactggtaagtcaagtgcaactggatgcttgttggatattgcgcatttatcaactacaaatggttttcatgcaactttttatgattatcaagcttttaatttatacgatagccaatattttgcaaacagttacacccaacaaagagttattggtacagcacattacattactgatccaaactattctattggtgctggtttccaaacaatttatgatgatgttaagattgatgcaggtttaggttatgtcaaccaattaactggttacttttatgcacaagaagatggtatttacgcttttacaattaagaatgttaacgacggtgcaatgatttggtttggtaacgatgatgcattttcttgctgtcaaccagatgtcattccatacaattctgaaaatggtgctcttatctatactgtcggtaaggatgtcactgcatttgttcatttcgaagctggaaaatattatccaatgagagttgttttagtgaacatccttcttggatcaactcttgatatttctgttattacgccatccggtactatgttggacgaagattggtcaacttggatttattcaattagcgatgttgaagatacccaatgtccatatatttccgttgatagctcttcaacaactaacaccaacaccaacaccaacaccagtacttctaacaccaacaccaacaccaacaccaatacttctagtactgataccaacaccaatacatctaacaccaacaccaacaccaacaccaacaccaacaccagtacttctaacaccaacaccaacaccaacaccagtacttctaacaccaacaccaacaccaacaccagtacttctaacaccaacaccaacaccaacaccaacaccaatacttctagtactgataccaacaccaatacttctaacaccaacaccaacaccaacaccaatacttctaacaccaacaccaacaccaatacttctagtactgataccaacaccaatacttctaacaccaacaccaacaccagtacttctaacaccaacaccaacaccaacaccaacaccaatacttctagtactgataccaacaccaatacttctaacaccaacaccaacaccaacaccagtacttctaacaccaacaccaacaccaatacttctagtactgataccaacaccaatacttctaacaccaacaccaacacttctagtactgataccaacaccaatacttctaacaccaacaccaacacttctagtactgataccaacaccaatacttctagtactgataccaacacttctagtactgataccaacaccaatacttctagtactgataccaacaccaatacttctaacaccaacaccaacaccagtacttctaacaccaacaccaacaccaacaccagtacttctaacaccaacaccaacaccaacacttctagtactgataccaacaccaatacttctaacaccaacaccaacaccagtacttctaacaccaacaccaacaccaacaccagtacttctaacaccaacaccaacaccagtacttctaacaccaacaccaacaccaacaccaatacttctaacaccaacaccaacaccaacacttctagtactgataccaacaccaatacttctaacaccaacaccaacaccaacacttctagtactgataccaacaccaatacttctaacaccaacaccaacaccaacaccaatacctctaacaccaacaccaacaccaatacttctagtactgataccaacaccaatacttctaacaccaacaccaacaccaacaccaatacctctaacaccaacaccaacaccaatacttctagtactgataccaacaccaatacttctaacaccaacaccaacaccaacaccaatacctctaacaccaacaccaacaccaacaccagtacttctaacaccaacaccaacaccaatacttctagtactgataccaacaccaatacttctaacaccaacaccaacaccaacaccaatacttctaacaccaacaccaacaccaatacttctagtactgataccaacaccaatacttctaacaccaacaccaacaccagtacttctaacaccaacaccaacaccaacaccaacaccaatacttctagtactgataccaacaccaatacttctaacaccaacaccaacaccaacaccagtacttctaacaccaacaccaacaccaatacttctagtactgataccaacaccaatacttctaacaccaacaccaacaccaacacttctagtactgataccaacaccaatacttctaacaccaacaccaacacttctagtactgataccaacaccaatacttctagtactgataccaacaccaatacttctaacaccaacaccaacaccagtacttctaacaccaacaccaacaccagtacttctaacaccaacaccaacaccaacaccagtacttctaacaccaacaccaacaccaatacttctagtactgataccaacaccaatacttctaacaccaacaccaacaccaacaccaatacttctagtactgataccaacaccaatacttctaacaccaacaccaacaccaacaccagtacttctaacaccaacaccaacaccaacaccaacaccagtacttctaacaccaacaccaacaccaacaccaatacttctaacaccaacaccaacaccaacacttctagtactgataccaacaccaatacttctaacaccaacaccaacacttctagtactgataccaacaccaatacttctagtactgataccaacaccaatacttctaacaccaacaccaacaccagtacttctaacaccaacaccaacaccagtacttctaacaccaacaccaacaccaacaccaatacttctaacaccaacaccaacaccaacaccaatacttctaacaccaacaccaacaccaacacttctagtactgataccaacaccaatacttctaacaccaacaccaacaccagtacttctaacaccaacaccaacaccaacaccaatacctctaacaccaacaccaacaccaacaccaacaccaacacttctagtactgataccaacaccaacacttctagtactgataccaacaccaatacttctaacaccaacaccaacaccagtacttctaacaccaacaccaacaccaacaccaacaccaacaccaacaccaacaccagtacttctaacaccaacaccaacaccaacaccaatacttctaacaccaacaccaatacttctagtactgataccaacaccaatacttctaacaccaacaccaacaccaacaccaatacttctagtactgataccaacaccaatacttctaacaccaacaccaacaccaacaccagtacttctaacaccaacaccaacaccaacaccaacaccaatacttctaacaccaacaccaacaccaacaccaatacctctaacaccaacaccaacaccaacaccaatacctctaacaccaacaccaacaccaatacttctagtactgataccaacaccaatacttctaacaccaacaccaacaccaacaccaatacttctagtactgataccaacaccaatacttctaacaccaacaacaacaccaacaccaatacttctaacaccaccacccacagcaacaccaacggtaataacaatggtaatggtaacaacaccaacactgcaactaacaccaatggtaatggcaacggtaataacaatggtaatggtaacaacaccaacactgcaactaacaccaatggtaatggcaacggtaataacaatggtaatggtaacaacaccaacactgcaactaacaccaatggtaatggcaacggtaataacaatggtaatggtaacaacaccaacactgcaactaacaccaatggtaatggcaacggtaataacaatggtaatggtaacaacaccaacactgcaactaacaccaatggtaatggcaacggtaataacaatggtaatggtaacaacaccaacactgcaactaacaccaatggtaatggcaacggtaatggtgataacaccaacactgcaactaacaccaactcagaagataatgacatgtctaaagttacccatacatatggttggactggatcatcaacaatttccagaacaatgacatggactactactggaactaacagaaatatcataacaagtactgatatatatgttgctcaacctgaacctgctacacaattttggactggatcatatacaaccaccacactccttacaactagtgcaattaattcagattacattccagtatttacaactatgactattgttgaagtaccatattcacaatcaactctttctacatccgcaaaaccaactacaacaccatcagtttcagatgaatacagcggtgcagcggcgtcaacaaacgttaaccaagctttcttgggattagcaatgttgttgttagccttataataaaatttcagatacctttttcactctattgatttcgatagtggtgattgtttatttacctttatgatactatatattatatatacatgtatattatattatatttaaaataattatttacctattgtaattttttaggtctttcaatcaaacacatgtattttaactagaactttcaataacttaattatttattatctttgttccaccaaatcaatatgaatgatttaggtcttggtacatgatattcaggatgtataagttgttttgttactggtggaacgaatgtctagttttgtgtttagaatattactgtgtatggtaattgtttagtactcgttgatggtggaagctatgtgttcagtcatttccaattcttgaagcgaaagatctgagctggccacgtaactgtaatcttccattaaaaaacttagaagagagcagtatacatgggaattaaagcagacatatttatctacatcagtaaggtctcaacgacggtaaaatgttgtattgatagaagcacaagtttttattgttaatttcgtttatcaaaaagttgttgcacttaagttttgcctgtggtttcccattaaactaacagataacattctttgcagcttagctacagttaattgtgcaaaaaagggttttttttacactcctttcaataaaatatacaattttatacaaattgattactgatacgcatatattatttatgcttcatcaattcaatatatcttcatatactgaactcaatgtaaattatttctactaggtcattctttaacctttttcttctaacttagatctaataagaactaaatttttcatatttgaataacaaatatgtatctttaatatatctttttgtaatcctaaactctaattttttttttttttttttacattaatttcattaaaatatacaattttatacagattgattacttatacgcatatattattcatgcttcatcaattcaatatatcttcatatactgaactaaatgtaaattatttctgtttgattattctcaatctttttcatctaatttagatctaataagaactaaatttttcatatttgaatagcaaatatgtatctttaatatatctttttgttatcctaaactctggatcattcttattgcttttgtagcattgtttgttaaaaaatataattaacttgattattatatttgctttataagcatctttctttgttgatattaaaccaacaatattctttagatcaatttttatctctaattcttttagaattatttcaattcctttacagttgaaaaagacatgatgagtcccaccttccccttggcagaattggcaaggatgataaaaatgggaattcaacattcctgtttgtaattcaaataattcattaaaatcaacatggttttgattggtgattctacccaaccaaccaaagcatgtttcccaatccagttgatggtctagtttaccatcccaataatcagcattaaatttatttttaaattcttctttgtaaaatcttttagaaaagtgtttaaatgattcaacattgatttcctgatttttattgaaaatttctataattttccatttttattacgtaaacagcaattaattaacaaaaaaatgtctaactcaaaagaaaaaaaattggagggatggccgagtggtctaaggcggcagacttaagatctgttgggcgattgtccgcgcgagttcgaacctcgcttccttcattttttgattttttttatatttttgaagttataataaatgcgtgcttttgcttaaatgaaaagatggctgacatttatttttgtcaggaatgatataaatatagaatataattacgtaagatatattacgtaaggaaatgatatattgatagtaataatatcataatataggtaacggggcaactcgttacatgagatatgtataagaggggcaaattcccacagaatataatatgtgggaataactaatagttatgtagttcttcttatatagattcttatctagatatagggaaatcatcctttagtatatcttattattagattattacgtaattgtcatattcgcagaagtaacaagtataacaatttttttaaactgccaaggataaattcacattacatttagaaaaaaatgaatctctaaaaaaatttaattaatcaaatcattacttttaatgaaaacccgatacctcccaatctttgatcagatctaaccaagatactacatcaccagatctactgttgttacttagttcattaccaactctccaaacctccatcattatttgtttccctatccatttgtttcctgcaacaaaccattttcttgctaattcatcaaatcgatactgaagttcggaactgattgcattggagccggaaatgaaaaaacaccaaaaaggtggaaatattttcatatctttcaagaaatcactcctcaatgagaggtttttaagttgttctaaatgtgttatagtagatacaacatgattttgaagtaaattggggtctatttctttgattagtcgaaaaaagaacaaaagggtagtgttgtaaaaggcaacagttaaatgatataatgctttgtgaaataacgagtggaattgtaatatttcggtattatttgtatcaaccgtgtacaaatcccagtcagttttccagttaattaactcctcctctaaatcacagcagaactttagaaagtttcttgggaatattttttttcttaaacaccaatttttatgatctgctaatctgactgttttttctataagttccaacaaggatagtgggattccaaaactaatttcaacaattgaaactcttgaaaaattattctgtttcatgtcagatgccaagttagatggattcggaatatgcaccttataatcctctctaaaaaatctttctctttcatcaaaggtcatattgtttgattcacttgataaccctgtaaggggattcacttttttacttccagaatttttgcacttgatgttatacttgccaaacttattagtttctttcaaagatttcatctcatttgagccattttcatcattgtaatcttcttgttcactatccctttcgtctatatttccgggtttatttttagtttttagcattttcatcaaaatgaaaacgcacagtaaatgatttgggaggtctatcttcgatacacggtctctttgtcaatcttttcggtatttgtatatcaaaatcttcggcaccagttgaatcactggaatatgagatatcattatcatcactatcactgtctcctacatcatcatcttcagattcttttgtattatcttgcttagatgtcatagagtttggggctatttctattttattgtattcactcttgtcaaaatagtcattaaattcaaaattttctattaaattgtaattcgaactgacatcctcaaaaccttcctcatcaattttataattatcgagatcaattttggagcatgatttataaaacacctgaatatacctgaaccaaagccaaatttcatcaatttgcttatctgatattttcattaaaatatactgttcttttataccatcccaagacattgtagatcaatctataattattaataatatctaaatttgaatcttgatatatcgcaagaattaacgtgagtatcagttctttaaataatccagctttaaataatctgttaagcaaatatacgttatcaatttttacgggattagttactcccttcagtagtagaggttttataattatggacaaattaatcaaagacatctctctaaaggaaatataacatttgaaaagctttagagatccatcataaataccatattcattaaataattttttgtattgagagaaagcagtaattgctaaaaccaccatacaataagttctctttagtaaatcacaataatgcctaaactcaattccattctcagagactttcccagaccaatcacctggcaatcccacagagcaatcaaagaccatcagttcgcctacaattttgtataatgaaggaataacaactgtatcgaatatagatccattaaaattcaaaatcatcacactggtctgtgacttgacaaataatctgattaattcttgtactctttgtgatcttagcaaagctgtaaacgaaggtgcagagactaaagtatgatcagattcagttaaagctctaaacacatgattaatacattctttcatatgctcgtcgttatcagtggaatcatcatacattttatcaacaattctattttgcaaccttgaagtcataccatatttatcagcaaatataacacccttaattatgtcccaagattgtgtaacaacatcagcagagcctactagtgcttgatatgtaagaattgcatcaatttcaagtcttggatgtatccaaatgggattagattcaacattatccataattctatgtgttccatcatattctatataattatttgtattattacccaacttatttataagatcacgttgcgtttgctgttttttcctttgataattcatttctaatgctggcggtaagggtaaaagttttggattcgattgtaaatatgcagttgtagaagtattcatctcctcagaatgattcatattcattattgatgatatggatggtaaattatttgtcctgtttgtattaatattactgcctgcctttttcattacatccatgtgattattatttacattgattggaatttttggaggattaagtggaacaattggtttactcttagatttcttatattttgtaaacatagtttcattagtgaaaactgtaaatggacctaaatcaaaattatacttactgttctcatcatgtatcaatgaatcaacttcatttatcttgaaatcaagttccttaaaagtaccataataacaagatggaggcattttcattaatggtaattgttgtcgtttatattcattcttttcaatatctattttcaaactaaacacttttccattctgtattgttaaaatctcactaaattttaatttgaaatcaaaaccttcacatggtttattagacttttcacatcttaaacatttaggacgtcttccgtcacatttaactttacgtttccggcatgttaaacatcctaaaaaattacgctttttaggtctattatttttaattgaagtgtttgttgatgagttgtttttagtgactttcgtttcagtcataattcctatatcttatgtaccctatagagttcaatacgcagacttacccctgtatagtgtgttgatacgcctattatactgaaagaaagaaacattagtaaagaaacgattagaaataaaaagtgcaactgcaagcgagcagttatctcaacatctcaatacaaagttaaacttttatatattgaactttgtatgatctcttatatctgtcggacaacagtagatgaggaatcaatcaaccgtcaagtatattttaaatatcattataaaattataaataaagcttctctataatgtatggcttattccagtaattctaaagaatcttcattagctacactattccttactttcttctttccaggtttcagcggagatgatgattttcttttctttgcctttgcatctaattttggacttactgaaagagatgactttttattaagttcagataattttgtgttaactaatgccctgtacatttttttgttagattttggtgtttcaaatttactttccatatcattttcatgattttccttttgttgtaaaatttggtcccttttacttatcttattcttggttttcttacgttgagctgcacctatatcaatcgtattatccttctcatgaacattatcattatgaatattaaatgaagatgattttattggagatgacaatataggtggtaatccaatatcatccaatgggtctgtgttcaacaagtttaatgattttcttggtgttctattgactggttgactagatgtaagagattgagacaacgcttcacttaagctatcatttgtgtgtgatttaagggattcaagttcacgtttttcaatagcactgattctattcttcaacatttgaatttcggttttggaagtttggagttcttcctcaattttaacattgttagtttccaaggaagttacttgatctttcaacaagatatttttatttttcaaactattgtatttttctaaaaatttagctttatcagatacttcatctttcaaatcagaacaaaccatttgtaatctcgctaattcttcttcaacagattttttactttgaattatagattctacctcatcacctttacgtttcaatttagtctccaaatcaagtaatacatcgttcaacttcttcttttcagcactatcagtctcagattcaatttcctttttatcatttatttcttgtattttatattttaatgttttattctttaagatttgtttatcaagtaataatttaaaagcacttatttcttcttttaatttagtttcgatatcatctttactctttaataattcatcataatttgactttaacttttctacttcaacattcaaatcactaagttttgaactattattctcaagttcactagtttttgcttctaactctgctttcaattttacaaattcaatatttttactgttgatttgagttttgaagatagcttcgttatcagtattttgttttttgagtaataatatttcatcattttttaagttaaaggattcgtcaattgattttagctcttcatcgtgagttttctttagtttttccatttgggaacagagtgttttatattcattggttttgttcaataactcttctttgagattttgtacagcagattcatcattttttaaaagtaatatttcatttgctctttcttctagtttgtatttaagagaaccaatttctttatcagatcttgccttcacctcattaatttcactttcaagtttacaaatttcattctcttttaatttgagtatctcatcattttgatctttcatagatttagataattcttgcatatttttaataattgtttctttttcttgaagttttgattcgcctactctgatggattctttcaataattcaatagagttatttaaatcttcatttgaattttctttattttgaaatttttcttgtaatactaacaaatcattatttaattgagaaacctttccagttgatttatttaaatcatcctttaatcggttaattataactgatttttcgtcttctaattgtttaagagcagtatcattatttgatttaatatctgaatatttaagattgagcatttcaatttccattttcaaggattcatttctaactaatgattcttcaagttgagttgatattttttcaattgttttagaatcattagattttaattcatcatataaagcttgtaattgagaatattgatgtttcaattcttcaagttgagagtttgtctttgttaaatttaataaagattcttctaactccttttctctctctgttaaaattttatttaaaccattaattttaaccataaaagagtctgattgatcttgaagtttcttatcagttacggagatagcttgatttgaaagctcatcaatttcctttttatagtccaaggtaagttgcaatacattcttttcatgttccttatacaatttatttcttagtttattttcattttccaaaagggtattttcaagtgattgaattttcaatttcaaagctttttgagaagatcttaatttatcaatttcatcaataaaatgtttttgctcaactttaccaatgactctttgattttgttttgatttaatagttaataatgatttcctttgtaaatcttgatatttaattggatcaatgtatcttaaggtttgtaaaattaaaccttcttcaccaaaaggatccaatgtaactaaaatattaacaggattatttgatttaacaaaatcattgagtaccaacctagttaatttattagttctcagacaagttttatgaaattgattcattgaaataagttctaaacatctacccaattcagttaatgaaccattagtataacttgcctctctaagtgagatacctgaagttctagcagattttgatctttctaaacctgctaagtcaacaattgtaaatctagttgattctaaaacgttaccataaattttataaagatcgaaaacaatgaaacaatgagatcttgatgaatgattatttgcaaaagttgggaaagttttcctatttttcaaactattaaaaataatttcatgagctgaatcatatgaattaactaacgttttagtaatattacgaggagtaagtttatgatctattggatctgtaacaatatttaaattatttctatcatttttcatatttgaatttaaaagatcattaatcgaatcattatataattcaaacattgaaattgataaatataattgagaattaatgacagaattattaaaattattattcatttcacatgaatttttaatatttggataaaattttttaattggtgtaatatcattagctaattgatcaatattttcaaatatacaatgtaatgatttctcaataattgaattatcattttggaaaagtaaatgacttttacctgaatttgttggacccagagttaataaaagggagtctgttttattgaaaaatttatctttaattaatgaatataaagctttttcaaagacattgtcattcggataagaaattgatttaaaatcaaattttgtttgaaattttgggaaaataattttattctcttcagttgatttttggaaaactggggttccattaccagaagagggatcagactttagaactaaatgaacatccattgcagaagtacttctctagttgataaatttaataaacaattctccaaaacaaaaaagaaagaccaaaatggaaaactgaaagaagggtttcccattataaaactaagaaatcggaatgtaaacaatacgaaagcgtgaaatgtaaacaaagcggaaaaaaaattaaaattaaaattttcaaaacgtcgcgtctgccaagattacataatcagaaaattgatttagttaaaacaacttgtatatcgtttcctagaagttttaagtattcaaattttatttttaaatgatgttaggtttcatctgtaattaaagagatacactgggatgagtgaggatcagaagaaaagatcatttgaggatttgaacgatggcagtaaagatgatgaaggtagagatagcaaacttttgaaaactgataaagacacagtgacaaatatagagaacatagaagagaaagaagtgaaacaagttgaaaaagttgacaccaatttggagaaggttagtgaagaaacaaaggaaagtaaagatactgaagatactgaagatactaaagataaaccatcatttgtttttggctcaactacaccatttggtcaaatgggaggatttaaaatgttcggtgcattctctaaaccagctgaaactgagaagaaattagatactgataaagaaggtgtagataaaatcaatgaaaaagatgaaaagaaagatttttccagtgaacctaatgtaaacaattccaatagcaaaccaatttttggatcaggttcaacatttggtaatgcatttcaagcagctatttcatctaaatctgtttttgatgaaataaaaccatcaacaaatgatgaaaaagaaaattctaaaaaaaatgatgataatgaagaacaaaagaaaaatgataatgaaaaaccaacagaggaagtatcagattcttataaaactgttcatcttgagaaacaagaagttaaatcaggtgaagaaaatgaggaaactttgtttcaaataaaggctaaattatatcatatggaattgagtaatgctaaagaaggatggaaagagagaggttttggtgttattaaagttaataaatttaaaaatttaccagatgccaaatatacatcaagaattgtcatgagacagaatggtaatttaaaattaattcttaatgtaccaattataaaagaatttaaaatattaaaaggtatgccaagttcattaatgagtaataaatttatacgattgcaactaattgagaatggtgaacctgtacaatatgcaattaaaattggacaacctgaaaacgcagaaaaattatttgataaggttcaagaacaaattcctgggaatgattcataaacttttttaatacgttatttacatgtaaaagtacaaagattctataaacataaacaaattttatataaacaaaaggtaataataaaagcgtcgggtgatgatcaagttgattattccctttccagggaatgtatccttagtgatcctaccaaattaagtacaatttcttattattacaactgctataacaatatttgaaaactttcttattcacacaccgaaattttaaaagtattatttactctctataaggtattaacttatactttttggaaagcaactgtacaaatagttgaacctttatgacctgcaaactctaatacaggataatcaactttcccgaaaacttttaattgtccatttttagttaaataattagttaattcagtttcagtaaaattacatgaagttataagtagaattgaatcttttttcaataatgttgcaaccgtatcaggataaatttgtacacctaatttatcatcatgtaatttttcaccatttaatgaaatggcatcaaaagtccccttatcaagaattatatcaaatgagtcaacattatcaattaaaaatgaatcttttggatttagaatatcagatttgaaaaatttaacatgataattattttcaactgcaatatcttttgcaaattcaacacttgtttcactataatcaacaccaattaaattaccctttaaaccatcttcaaataattggaaaagtaaatgtccattacctgttcctaaatcacaaactttaacatcttcctttattataatatttgataattcattaaaaatgtaatcacacatattattttcagcatttgatgcatcaaaccaacattctccaatatcttccttattatctttaaaattattatgttcaagtttatagaaactatcccaatattcctttgtacctaatttagagctctcaaacccaatttcattatcactagacatgataacttatacctatatatacctggttatggaaagaaatcagcagtaattatacggtaaataaaatttccaaagttaaagttagagagctagattgagattcatgtttttcattatgtcgctatttgataaatatatcaatagcaggtgaaaagttatattttgaatttaggtcaagattcaatattaatattgattattttgttttgtatcttttatatagtttctccttctatagctaagtcttattacataaactaagttttattacataccaaccatcctcgattgttgtatatgttattacattgagatacagaaaggcacgtataaacagttcttggaactacgttcataattagtgctgacacttggtacttgaccctgtatcgaggataataatatatcaaaatggtgtttattattacctatatgggatcaaatatatgggatcaagtgtaccagagtagtatatttacgcgagaattactattgaaaaactgacacatatataatattacgataataccaaatttccatttttccgcttttcaacttaagagtcttttttctttatcttctttcttcataataagacaaagatgattaagaatattacaggtacccgtaactacgttacatcttctacacgtacaattttaagactaggtgcagttagatttgcacaacaagcatggactcaattgagtgaaaaacataatattgaaattcttgaaactgaagcaactagtagagatgaatttattaaagaagttaaagaaggtaaatataataatgttgaatgtattacaagaacttttgaatcagttaaacaaacaggattatttgacaatgaattaattgaattattaaagaaacatactaaggttaaattaatttcacataatggtgcaggatatgatcaaattaatgttattaaatgtggtgaattagatattaaagtatcaaatgttccaaaattagtcgatgatgctactgcagatactgcaatttatttattattaggtagtttacgtaactttcaaatgtcaagtgaaaatttaaagaaagggttatggccaaaatttaaatgtgctaatacaccaattggtaatgatccaaatggtaaaaatgttggtattttaggtatgggaggtattggacgtgatattcgtgatagattaaaaccttttaaatttgcaaatatttattattataatcgtaaaagattaagtgaagaattggaagagggagcaatttatatggaaagtattgaaaaattatttggtaaatgtgatattatttgtattagtattccattaaataaaaatacaaaacatttaattaatgatgaaacaattaatatgatgaaagatggagttattttaattaatacagctagaggtggagttattgatgaaaaagcattaaagaaggcattacaaaatggtaaaattaaaggttttggtagtgatgttttcgataatgaacctaatgttgatatggaattaatcaatatgccacaagtcacttcattaccacatatgggtacacattcatttgagacaatgaaagcaatggaagaatttgttgtggaaaatgtggatcaatatctaatcaatggagaagttatcgcgattgttccggaattagcttgattgggaaaaagtcggggaagtttccacttttcaccgttttttttatttcaccaaaaatttatcaatagatcttagtttcttttaattttattcttatttttatctatgtactttatatttatataaatataaatataaatgttatttatcttatatctaaagagacagacaaaccagaatggttttcacagtactaagattccaaccaattagatttgctgaagaagaatggaatgaattctgtaaaagtgatgatattcaattagttgaaccaacattcactaaaagggaagaattcattcaagaattgaaagatgggaaatttaaggatgttgattttattgcacgtacatttcaatctgcttcaattagtggtaattttgataaagaaattattatattattaaatgaatatactaatgttaaaggtattgcacattgtggtgcaggatatgatcaaattgatgcaaaatcatgttcagaatttaatattgaagtttctaatgttccagataaagttagtgcatcaactgcagatactaatttattcctcatattagcaacaatgaggaatttccaattaggtcataataatttaatgaatggtaaatgggagaatgatgttaattgtgcaagtacaccacttggtcattcaattcaaaataaaattgttggtattttaggtatgggaggtattggatgtacagttagggatagattgagtggatttggattgagaaaagttgtttattataatagaagtagattaagtcctgaattagaaaaagatagtgaatattgtagtacaattgaggaacttattaaagagagtgatgtaatttcaatcaatttaccattaaataaggaaactttccatattattaatgaagaattaattgataaaatgaagacgggtgttacaattgttaatacagctagaggaccagttgttgatgaaaaggcaattaagaaaggtattttaagtggtaaaatttatggttatggtagtgatgttttcgaaaatgaaccatttattgataaagaatttgttagtatggaacaagttacatcattaccacatatgggagcagctacaagtgagactattaaatcaatggaagttcacgttctcgataatgttaaaagctattatgaaaacggtaaagtattgactccagtatgggaatgtagaaagtaagtggattttgttgaattcgcgtaaatgctatttatttatttaacttaaaaaatactattcaattctataaaataaaataaaaactcttagtgtatataacgtttgattgagttaacaactacatctacaaatcaagacatataaataacaaaatgcttatcggaaaagatagattattgagaatggaaaaatgggataatttacctgctaaaacatggtatcttataggtagtgttacattatcagtaagtaataaacctgaatgtgttgcagaaatttataaatatgttgttaattcaatgaatttatttaatgatagagttgaatgtacattacgtattagagaggcaattatgaaaagtgcaccacttgccggtgttccaaaggcaattaattcattaactgcattacataatgtaacaccaattgatatattagagaaaattaataataattactataacaatcaacattatagaaattttgaaatcaataataatattaaaagaggtgaattattttggaatcatacttatacaaagataagtaaaagggttgaagatcaattacgtaaaatacatcaaccattatggaattggataattgggaatgtatatggtaatgttttgagtgattgtagtatattaaatgaacaagatacagctatagttgtattatcatcattagtaccacaggatgtaccaaaacaactacgtggtcattatattggagcaatcagaggtggtataccagaggaaagtgttgattcaattgtatcactatctaaagaagtatctcaatggtagcaagggtggtgggtcacttaaaaacagtcacgtgccgggtgcgaataacacgtgagattgcgagtgtggcttattctttactaataaaaaaaattctcattttatgacattgatatattaaattatgttttactaatagaaactgataaaaataactttaatatcatcaattatgggatatattgttcaatattcaattaaacttgaaatcttttcacgttttgggaatttgatcttttcattatatttaattgattgcgttatttagaaattgattattaaggggtaatgtcaagtgctaataacaatatctccagtaatcaaagcactggtggttttaataatacctaataataataacaataataatagtggtaataacaataacaattctaatggaagctcaagtactgatgatactccaatggcactgttagaacagttagtttatattgataatttctttagtcatacagattctccatcagctcaaactaatgaatctgttgatgatcaattacagagagaattagctgcttttgctaatgatacttttatattccctgatgaagataaaccaaaagtaaatagtagtaatggtaacggaaatggtaatgataatggtaatgtaaataacaataataactctaataatgctaataactctatgtcatttggttttgatcatatattctccaaatgatgcaataactcctccaatacctgcaactcattatcaaaatttatctcaacgttataataattcaaagcaaaaatttacttatcaagatacaattactcaacatatggcttcaataccttcaactattaatgaattattaagaggtaatagtaataacaataacaacaacaataataacaatagtactaataacaataataacaataatacagctaatatcaacaacaataataacaataatacgaataacagtggtagaaatcaaagcaatggtaatcatagtaatacaacatcagtttcaattaacgaatttaatgatgcaagaattactcctaatacacctaacactcctattacctcaaatttaactccactcccttcaattcctcaaggtgcccaaaatactttagccgctgcaggtttatcacaaagtcaaattgatgcattagcaagtttagttgcatttcataaaagtgatcccaaaaatcaaattagtcaagcttcatctcctggtttaagtttaaatcaaagtttatcagctttatcaccaataaataatattcaacaagtaccatcacaacaaaatctacaacaacagcaaccattacaacaacattttcaacaaaatttacaacaacaacagcaaccattacaacaacaacaacctcaacaaaataatttattggttaatttattagcacaaactttagcatctgctcttactcctcaacaacaacaacaaaatttacagcaaaatcttcttacacagatactatctaatattaatgtacctgaacctaatcaaaacttgaatatacctgttcaacaacaattatcacaagttcaatcaatacaggctgtacaacaacaacaatctgttcaacaacccgttcaacctgtacagcaattatcacaattatcacaacaagcatcatcacagcaaccacaaataacacgctcaacatcatcagttgaacctcgacagaataagagaccactgacatttaaaaattctcatcttgatgtcaataaaaaaacatctgaattaactgtacgtaaatctacatcattgttagcagctcaatcgccaccatctacaacaactcctttaactacaacattatcaacaccatctaataattcctaatttaattataaaggataatagtgtatcatcatctgaggcaaacactgatagtaattcaagatctaccaagggtacagcatccgttagatttagacaaaagaagaaattaaaggaattagaaatggaaaagaatttacaagaaagtaaagaattagctgaatcacttaaattgaaaattcaacaattagaaatggagaatagattactacgtgatttagttgttgaaaaatctcatcaacgtgataatgatgaagttgaaagattaaaaagagagcaaaattacaagttaaatcgaatgagactttgtaatgttactaactgtatttctatactataactataactataactatccggtataatgtatatggttacatgtattctgtataataataaaaaaaccattaaagcagctcttaatcactttttttttttttttttttttttgaacaaacgaagttaagagtgtaatcacagtacatacgcgatgaattattttctataaaaataaaaagtgttgcttcatttttctaatctacaagtttctataatcattttattgtttattcttcattatccaagaatgaaagcaatcgtatcagtatgtttaatagtgatttattacaacttatagaaatataaatactaacaatactttttcatttatttttatagccagcaaaagcatggttttgtaccgttatatccgcattcgggatagtgatattatcagttattgcaattttatttaaaattaatcatgaatcaatgatgggatcaattacatcacctgaaaatggtgatgaagttgctaaaacaatttttggtgcaattatattatatattgcattctttatcttctgtggtttccaaatatttgttagtagaagacaaaataaaattcaattatagacagactaatgacaattgaagaaaaaaaatgatttctgattttactaagtttattactactactattttgtataattaaatttatacatttttatattatatctctctttataaagaacaattatcaaagcttttatatacatcatattcaaagataatgttgcgtcgatatagtagcacattgaaaaatcaagtagttataactgatccttacttaatttataaaaatttagtgatgaatgaaaaaatcaagaaagatccacatcaattagcattagtaaagaagttaagtttattatcaaaacaattacaagattataaaccaaatttagttgatgttaaaattaataaacttatacgtgatattgaaattaaattatcgcaagatgaaagttggagaaatagattaattggtatgattgataaggaaaaaagtaaagaacaacaatgtttaaaattaattaaagtggttaatgattatgatgaattgtataataacagggaaatggaacatataccaaagggattattaattaatggagatgttggatgtggtaaaagtatgatgatggatattttcgccaattcattacctattaagggtaaaattagaattcattggttagttttcattgaattaataattaaagaaattgaaaaaatatcaattaacaaaagagataacaatgaacaaataaatcattcaattttgaaatatgaaaatgaatttttattatttcaaattgcatcaaatttaattagtaaatatcatgttttaataattgatgaatttatgttacctgatattacatcagctaaaattgttaatcatttatttatttattttttcaaattaggtggtgttttaattacaagctcaaataaattaccaaaagatttatattcgggttcaattaacaaagattcaattgaaaattttgaaaaaatcctaaaggcaagatgtgaactatggaatatgacaaatgatatagactataggaaaattgaagataatgaagatgacaattggtgtgttttaagagatgataagaaaagatggaatgaattagtttcaagtgtaattgatttaaataattgtgaagccaatacatgtaaatttgagaattatagtagagagattagaatacctaaatgtaatgaaaatgttgcatattttaaatttaatgatattattaaagatggtaaatatggtaattgtgattttgtttcaattgcatcaaatttccaaatcattataattgatgaaatacctaatttaactaataatatgaaaaatcaagcaagaaaattgatttcatttattgatgcaatttatgattgtaaatgtcaattaatgattaatattgaaagtaatattgatgaaatatttttcaattcaaaggaaattaataaaaataaaacaagatttaagtgtacaccacttgaagattctgtaacaaacgaagttcaagattatgaaatgtttactaagacagaaatggatttatccaacccttatagacctaattttgcaacatatgaagattctaataaagattatcatatgagcaatgaaacggaaaatgttaataacagtgaacaatctaaaaattatactaatttaaagaaattcacaggggatgatgagatgttctcatacaagagagcagttagtcgtatctacgagatgacccattccaagagatggagggaaaacaaatggatacctaatgatatcaaacaattgtagtagtagtagtaaatttagtattataatgtataagatgctgagcccccattgaggaaaatcgattattgtcagtatacggacaatagtgaacaattgcaagtttgccagcaacgatgcttttattagaactgtatataatagttatagataaccattgaaccttttgttataatatggaatacttgcgagtgacaaaggtacgagatgttcatatgtatcgacgtggtgagaaatatgaaggtacattacatttaactacacatcatataatatttacctattgaaaaggggaatggacgagaattttggttttgttatccaatgattgaaagagttgaattctatcgagggtcagttatgttatttgaggaagatgtagttaaagaattaagtaatttatcaaataataatggtataacaagtggaatttggaatatgattggtagtgaagataattataataataatggtattagtgaagaaaaattaaaattaagtgaagataaacaaaagttattaaatagaggttgttgtttgagaattcaatttagagattttaattatattgcatttgatttcaaaaatattttaaaaggtcaagatgttttcgatagcatgatgagattatcatgtattgatgatattaacaaattatatgcatttatttatcaacctgttaaaattgaaacaggattaaatggatgggaaagttatgattttatgaaagaatttacctagacaaggattaatgttggatggtagtggtgatagttcatggagaattactaatttaaataataactttgaattatgcgatagttatccaagtaaattgattgtaccatcaaatatatcagataatatgttaaaacatagtgttaaatatagatcaaagaatagatttcctgcattaacatattattataaaaagaatggttgtagtattgttagatgttcacaaccattagttggtataaagcaaaatagatcagtacaagatgaaaaattaattgaaatgatttttaagagtaataatgatagaagtccgaataatttaattgttgattgtcgtccaataactaatgcaatggcacaagttgcacttggtgcaggtactgaaataatggataattatattgagggaacagagaggattttccttaatattgagaatattcatgtaattagagatgcattgaataaaatcaagagtgttttaaaagagagtgatgttaataaagggataatgaatattgatagtgttagtaatggatggttagaacatattcgtagattattaaatggtacgaatatacttgtaaataaaattcataaagagaataatcatttgatagtacattgttctgatggatgggatcgtacatcacaaataagttcattagttgaaatttgtattgatccatattatagaacaattaaaggatttattgtattaattgaaaaggagtggaactcctttgggcatagatttagggaacgtaatggatatttacaaaatgatcataaattttatgattatagagagaatggatcaagttcagcaattaagagattatcacagagatataaacattcacaaacggttagattagagagtccagttttccaacaatttttacattgtatttattgtttaattaagaaatatcctaataagtttgaatttaatgaaagatttttaagaaggttagtatatcatttacatgcagcacaatacggtacatttttaagtgataatgagcaaatgcgaatagagggtgaaatagaggataaaaccgtgtcagtatgggattatttcaatgcaagaattggagagtttaccaacaaagagtatcaaagtaaaatagatgataatactgataacgatactgataaggaaataatatatccccacggaaacgacgcgactctgtggctcgaaattttcggaattttcaaataaataaataatttttaatataattttccggttgaatccttacgtaatctctattcattttatttttcccccaggtgggcgagcggaagccggtgtcactaaataattgataatgaccttgtttgcacatacccgggaaataataggaaaagaggaaaagaggaaactataggaaaccattcaattaaattaatattttgaattttacgttttttaaatataatatcaaccgtattttcccccagtttgtgtaaatttttttcccatttcttttaaattatataaattgtaaaggccaatttctccttttaacagctatcgaagacaatgcttagatcaattaataataacgtagttagaaaatctttccaacaaattagaaatctttcaattcacgaatatagatcagctgccttacttaaatcttatggagtaggagttcctcgtggtgaagctgcaagaactcctgaagaagcttttattgctgcaaaagatttaaatactaatgaaatggttcttaaagctcaagctttaactggtggtagaggtaaaggtcatttcgataatggtcttaaatctggtgttagattaattgaaactcctgaagaagcaaaagatttagctgaaaaaatgttaaatcataaattaattacaaagcaaactggtgaagcaggtaaaattgttactgctgtttatgttgttgaaagaaaatatgctttacaagaagcttacctttcaattgttatggatagaaaaaatcaatcaacaatgattattgcatcatctcaaggtggtatggatattgaaggtgttgcaaagaaagatcctaatgcaattaagaaatattcagttaatattgatgaaggtgtctccgataatttatcattagaaattgcttctcaattaggttatactgaagaagcagttccaaaagctgcaaagacaattcaaactttatataaaatctttaaagaaaaagatgcaactcaaattgaaattaatccattatctgaaacaaaggaacatgatgttatgtgtatggatgcaaaatttaattttgatgataatgcagcttttagacaaaaggaagttttctcttggagagatgttactcaagaagatgctgacgaagttacagcttcaaaatatggtttaaattttattaaattagatggtaatatcggttgtcttgtcaatggtgctggtttagccatggcaacaatggatgtcgttaaattatatggtggttcacctgcaaatttcttagatgttggtggtgctgcaactcctgaaacaattgaaaaagctttcgaattaattttaactgaaaagaaagtttctgctatctttgttaatatttttggtggtatagttagatgtgattatgttgctgatggtttaattcaagcaactaaaaacttaggtttaactattcctgtcgttgttagattacaaggtactaatttcgaaattgcaaagaatatgattaatgaatccggcttaaaattattcttagaagaagatcttgataatgctgctgaaaaagtcgttgaattaggtaccaaatagattgattgagaattaattttgtttttttatctcttataccatattcaatataatcctatatattattaattattataaaaatgtgtatagactctaatgttattatttattcacattctcccattcacatagttcactctaattgtgcttgattcaatagtaaatctaaatattcattttgtgaaagttgagaactcaatacattaccactattttcagtaaattgttcttttataaactctccatctgatggcataatttggaaacttttactatcttcttcattttcaatctttgcactcagtaatgcgccacctaatctaggtaaattctcctttgtacttttggcactcattgtaacaacacttacatttgcctttttcttctcttcttcattattattttcatttttattattattaccttcattcagttctctctctaattctctttcacgttcaattttacttaatttagtattatcaatataaacaaaatgtggtcgtaacatacaagtatcagaaattggtgttatatgtaattcaccattctcatcttgtataccaatcaaatatctattaccaccaattgatccaggttgtgcacgaatacttgataaatttgaatgtaattcttgtgtatttacaatgaaactgttcattttatccttttccttatcattctcattcttaacatctgcgtttgatttattcattaatgatgaggaacttattgtaccaactttttcatcacctaatggttcatcatgtataataatacctcttaaatattgttctgaaacattatatttttcactgacactattactgaaaaaactatctgtatttaatggtaatctcaattcaacgactccagattttggctttatttgtaatctatgtaatgctgatatatgattttgcgttaaatttgattgacgtgatttagttggaaattgtaataacaatggtgaaagcatatcttcattaagtaaatttaagtgaacaggtatggtatcaataactggatcatcatcatcatcgtcatcatcatcatcatcactttcactatcagatactgcatgatcttgattgtatttcttgtcttcagtttcaggttcttccttcacttgagttccatttgatttattattttcttcaattccattcatttctatatctccatcatgttctattttcacggctatttcttgttctgcttcctctgctacaaataatgatgacatccttgcttaattagaataaacaaaccttcaaaattattaataaattttttattgctaaaatattcattgattgatgtcgcatgaaaaaaaaatatttcaaagctgtgccataatatttttttttcatcaataaaaatttattttccttaccaaatattcacattaaactttaactgaagatttttttttattaaacattaaacatcaaataaaatcatggctgataatgatgatggaatgatgctaaattttgcaatgccagcacaaggtgcttccgcaactgttgattccaaaaagggtaagaaatctgctcctaaagttaaaggtggtagatgggcagatagaagaaaggcacaattagctagtatgggtagaactgataagaaaaagaataaaagtaaaggtatttcaggtgcaaatgatactcctgttggtgaacgtaagaaaagaactgctgatactgctgatgatgatgaaagtaataaaaaattaaaagctttaaatagagaacaaggattaatcgtttcatcattattcactgcaaatccagaaattcaaaaacgtgattataagattgaaattgatgaagataatttaaaaccatcaaatgctccagttatggatgaaaatgcagattttaaagctctaggattacatgataatttaattaaatgtttaactgattcgaaatatttaaaaccaacaaaaattcaaagaatggctatacctaaacttatatcattaggacatcaaagaacaagaacaaatccttttccacctcaacctcgtgatatgttcatgcaagcccaaactggttcaggtaaaacaatggctttcacgttacctattttaaacatgttattatcttccaaaggtaagatcaatagacaaagtggtatttatgcattgattctaacaccaacacgtgaattagcacaacaaatttattctttcattgaagattctctatgtaagaaagcatgtaattggattgttccaggtattgtcattggtggtgagaagaagaaagctgaaaaggcaagattaagaaaaggtattaacattttagttgctactcctggtagattagttgatcatattgaaaatacccaatctttagatttatctaaaattagatatttaatattagatgaaggtgatagattaatggagttaggttttgaagaatcgatttctacaattattgctagattacaaaaagattatagagacaatgaccaagttttaggtccattggctgatgttttaccatttaaaagagttagtgtgttatgttctgcaactttgaagggtaatgtaaaaaaactaggtgaaattactttaaataatccagaaattataagtgcaagtaatacatatacaggtaatgaagaattagatcatcatatgaaagcaccagatcaattagtgcaggaaattgttgttgtaccaccaaaattacgttatactacattaagtggtgtcttgatgaatatgacgcaaagagaagattctgaaagtccatattctaaaactgttgtatttttaagttgttctcattcagttgatttccattttattgcacttactaaggatggtaaacgtcttaaagttcaaaaggataagaaagaaaagaaagatgcaaaagaaaaaggaaaaggagaagaagaagattctgcgggtagtattactgcaatgacatcaccaaatatttcatcaaatactattgtatataaactacatggttcactttcacaacaaacacgtactgctacattaaatcattttgctaatgataatactcataatactattttattatgtacagatgttgcatctcgtggtttagatttacctgaaattgataatgttattgaatatgatccacccttctgtattgctgatcatttacatcgtgttggtagaactgcaagacttggtaaaaagggtgtctctgtattatttttaatgcctggtaatgaagaaaaatatattgaaaagataacaccaatgcatgatgaaaatactattaaatttttgaaatacgaagatattttagcaaaagcatttggtaaagattctaatgaagatgaatcagaagataagaagaaaggtaataaatttaatagagaaggttcttgggatatgcatgcaactacttatcaattaaatcttgaaaaatggttacttgaagatcaaagagctttagaaattgcaactgatggatttatcaggtcatgttagagcttatgcaacgcatttatcaacagaaagagattgttttaatgtcaaacaaattcatttgggtcatttagctaaagcttttggattaagagaaactccaaagaaattagcaactaagagtactacagctggtgatgaaagcaataataataagaaggaaagtgccaagaataaaatgtttagattggctagattggctgttaagtcacaaaatgatgagtttaactttgcttgaaatattttaaaacaaaaaattgtatatttatttacctttataacaaatcaatagtagaaaagattgatcgatgaaataaattaggataaatagcgtaaccctttgtttacatttaaattctgctcctgtgattcactctataacgtacttccatcgcgtttgttaccttgctgagaaaacggtccgaatccgaatcactttttctttcatttttttcaattcagcgaaaaactgaaatgtaaatactgattgtaaacaaagcaccctcggctcaacacttaaatgtattatttattgtataatttattaaataattaattgtatttcttaatggggatctaagatgtagtaaagttaatctgttcaaatgtagatctaagtatgagactatatattttatatatattatatatatatatatattaaataaaacaagaataaacaaacagagaggcatttgtttaaatactatttctcaattcaactcaaggaaatcatttagtattcgtattcaacaatttaaatgatagttttttgctaattagaactatcgtgttctcatatttcttcaattaacatatcaaaccccacattctttctagccaattcacttgcaaaccgaaggtcatttgatgattgacaactagttaaatcgaattgatcatctactctctttgtttttttattagggggcagtatatcttcgtctgaatcttcatctgaatcttcttcatcagatagagacttttctttgattttatgtgttcgtgtatcaccataatgtcgtagtgccttctgtgtagttagtttcctttctataacaacaactttttttgtttcaattttctcttcaagttcctctgaattaatcttggattgaagttccaatatacgggtatttaaattcatcaaagaagatgaaatacttgagttcaaatcaagatcaacttggttcaaactcttcatctccttcgttcttctttaataaattgatatttttaaatttattaaacttatttgtagtaggaagaacttcattttctaaatcctcaaattctttaaatacagactcaaactcaagtaatttagaagattttatgattggggaactgacatcaacatgaacttgtgaagagaagtcatcaaatgcatgatccaatgatgatgatagatcttcccttgatgatgaaaaaatatcacttgatgagtatgaacatgaagacactgagctaactaaagatggggtatcgcttccagatgaaaatttagttggtgaaagacataaatcatttctttttgtattattttttcttttcaatctaccataccctgccatatttgcttatatattgactgcaacaagcaaagaaataactctttaacaacaataaatttcattgtttatctatcatctgtaactatgaaaattaagaaaattcatcacgtaatatacggaaattttcgcgttttgccaatttttttcgtgtttcaattttttacaaactaccacctgcatgtttcttctatatattatatgaatgcatcaatctagttttctatccgcaaaattcttaaaccagtgtactccccaaaataaatgtatggagatttagggacaaaattagtgttatctgctcaaagagctaataacctagacaaaattcctctctttgaaaatgaaatagttcaatctatcattaatgaatctaatgatttacaaaagcaaattgatggaataagtaatgaaccaatattaacaaatcaatctaataataccaatatttctgcattcaattcatcagttatgaatacaccacgaaaaagtgctgcagatacaagttttttctcatcttcagtcaataataccccaggtaataacgataacaacagcaacaaaaaaaataataaatcggcagaagttcaacatgtccttgataatttacctgaatttgttaaagacatgtttattgcaagaaataaaagatgccttttcgcatatgaaatgtcaagaatcagaaaattagatgaaatggtttgggataatatagaacttagttctgaacaattggctgatttatctcataatgagcgtgtataccttgaaaaatatacttctttggtaagtggtatgaaaggtgttatgccagatgttgatttaggtggtagtttagaacctccaagtgatgttttcatcgatgtaagagtattgaaagatgcaggtgaaattatgacggaatatggtgttttcaatttaactaaagattcacaattttttgtcagaaaagtagatgtcgaaagattaattcaacaaggatacttgaaacaaatataaactataaagagttgatcatattaacaaagctttcaaatattttatagttataaccatttctccatatgatgtaacgagattctaagaatatttcaaagatataaacacttccgtcatttttgactttgagagaacgtctatatgaacgagagaatacatcaccgggtaaagtgatggagattgtatttttcaaatgcaatgatatatagggaagtgacttcaattttgacaaaacctttgtcctaatactaatctcactcaaattattatcaaaagaaactttctttataaactttttgttattcaatttagttgtataatagttaaatagttcaattggtggtttacattccatattgaaagtccagaatagtatccaacgagtagtaaatgaagccagatttgaatctatgtattccatatgatatagaattttcctttgccttgagaagaggtatcaaatgtataactgttgagtgtttcccaaccaatgttgtgaaccaagtgattttgtttttaactaactcactttctgataacatctttgagataaatttaaattctcctccatcggtaatcaattctgatagatgtccagctgttaacttctttataaatgatcccttcattccgtttttagagctcatttcatttagtgatgaataaaatggaggattgcacatagtaaatgatgttatttcaaaatccaataactcatcatctaatactttaaaataattggtatctttatccactaacttaggatggattatactctgaagattattcatctcaacattagtaacagcattgtcaataaactcagcaacaatatcagttgcgtacattttcaaaatctggggtatgtatttagaacatattaatgggtatatacaggattgtgaagttccaatatccaatcctacaatcttgaagttttctaattttggtgtcaataaaagtaattgtctaataaattgaacataatcaagtctgttgaaatagttaggacaaatattctctcgttttaattttataatgtatcctaaatccaatcgtattagtagttgcgtaagttcaatgagggcatcatgattatcaaactcaaaccgtcctgtgcttgaatcgatgtatttaattaattttggttcctttgcagatagttgcacaaaatccaaatcacggggtatcatataatgtcacgtagataaggagtaatgattaaatatcaacaaattgaacataaaaaatcttgccaatttgatttttcaatcatgcatgctattctttctttattagttaacttatttatccatcatataataaaaacttaacatggcttcacgtgttctagatgaatttatcattaaagaagtagccaaaacatgtcctgaatcatttcttggatttcacaaatgtatggatgatccaacagtaacagataaatctgaatgttctaaatatcaaaaagatttacaagaatgtattaaaacaaaagtcaaagtttatcataatattgaagcaaaatgtgcttctgttattcataattatcaagattgtctggctttggataatgaaggtaatagtagtagtaaatgttactcgcaattgactgatttacgtgcatgtgcattagcagttataagtaatgatcaaaagaacgcttaatttgtttacatttattccaaaacaggtaggatttatatcattatattcaataatatccaataaaattaaagtatagttatgtgtgtgtatttaaaacctctctgtattttagatttatatgttcatataaacttaagttgattaaaaacccttgatgctaatgaaatttctgaaaaattgacacagtgagtgcacttttcaccattttttcggttgacaacctttttaccagtatgtttcttcttcttgaactttccttcattctccaatatacactccagaaaacattggctcttttttctagactctcaacggaatcagagtctcaatatttctggtagattgatttcttgggttctaagttcggttgtttaaacttttttcttccatgtttaactaaccctataatgaatccaacattttaagtcaattgaaatcctatgtatactttaacttgtaaaataaaactgaatttaacataattctatacatgaaattaaaatacataaaaaaatacactactgaatgctataaaaagctataagtaaattctataactattactactgatccatcattcggaaacgtcctcatatttatcatcatagttcggttttggattaatatttatcgggcactgaattgcctcatcatcaaaattatcaagccattcacatgaatgttcaaaataattatccctatccaattttttgattaattcccaagattcttcgaacccattatattcataacctccagtaaattccttaaacattaaactgaagtaatatattaatgatttcaaaccccttaaatatccaacgtcaggttctcctctatgaactggtggaaatgtggttttacttgaaaattcaacttctgctcctccaatgacacattgtgcaaaatcaatcatacgaactataattgttgattcatatctatgttgatgatcatttccactatcatacattaataagatcgatgatccgtaaagtctataattaatcaatttttcaaatcctaataataagttcattcatatcctcaattagttttggtaaatgttttattattgaaaatacactcattccatcatataaaaatctcgataatgatttaaagaattcatatccaactttgacttttctcccaaaatatttatccctgttgaaaaatgcattatttttcatatcccaaacttgcataccacaaattctcgttcctaattctcttgatgtagtttcataacatttctttctttgagaatactttttactagtcttagcctcaataccgtattgccttgtacccatctttaaatccaaaacacatggatataacattcctgaagttaaatcttctaataatataaatctttcaaacctggtatgctttcttaataattgttgttttcgttcatttagttcagattcaatggccatatttttctcaactggttcctcttcatccattgaaaaaatactatcattagtttcttcggcatttttggtaacatattcctccttcattacttcttcctcgtcatcatcatctacaattgcattttcactatcatctttcttattggaaaacttcttcaaattggatataaatgtttctctatcaggataactcaaactatcattttcagtagctgatgctgaatcagatctgtacttgtaatgtagtttgatatcatcactttgaacagatgatggttcaataattgaattgtttctactttcattccttgtaatatcaatcatgcaaccttctgttatactatcaggaatctttctgccaatatcatttgaatgttcattaaacttgagtgcgattggtgatgagatactacttgttgaatatctatggtatctaggcatcgttttatttgttgacatcgagtttgatctagaatttgcagctgaattgttgttatgatgtgagaatctcttgtttgcacgtgctctattggtataacttttgattggggcaaaaacttcactcaagactagttctttgagttttgtatttacagatgtagaacctgtgagagcggaattatcatcttttttccgattatctggaatagaaagttccaaattttcttctttgggggatttatagtgactccataaagactttggaacaatatggatattatcttgtagtactacttcagggaaagtaaattcttcggatttagtactgttagatctatctgtcagtaatgttttagctttattaaatctcaaattgtctttagcttctgtagtcatacttggaagagtatcaactaaagatttagttttatctagaggtgcatcgttaaaaatatctttcgattcctcttgtaaatttttctctaaagttaattcatcattttgggtggatagtaatctattagattcattaaaatcacgtggttcattagaatcatctaataatgtactatatctaacatttaaaactcctatatatttgggcatgaattttaacaactccggatgggcaatttcaatattttcgtaccatttattttctctatttactaatgctttacaaacagcacgatgactaaatttgaaaattgcagtatgaccaccaactttatttttgaaaggttgtaattcaactgctaatggaaatttggtttcatcttctaaacttttgatattgtcactaggtaaattttggaacactttcatccacaaaattattattatcatttttattattattattatcattagatattgaagaatggaataaatattcctcatccttatcttctatacgttcttcattatgtttattatcaagaatagacttcgattgtataatgttatctattttaccgttttcaatactatctactattgtactgaaactgtgagttttttcatttttattagttgtttgattttcatttttattaaggtcatcttcatcacttaactcaccatcaaaaaattcaatttcttgagtatcattatgatcaaattctgcagctgcggttaaatgttcaggctttatatcagagttttcatttggttgggtatgaggaaagtaaacagctgatgaaacaggttcacaaaccggtaagttatttatatcagattctggttccttgttgttaggaaaaatattttgagtttgatttggtattgataaaattggatcgacgttattatcttctgctagtttattatcattcttaggttcaaaaaatgttactttagagtgtggttcatgaagtgaattagaacttgattttgaatttgcacgagattttgatatcaaagattcatttgaatgtatttgtttcctctgtggtgttgttatgctttgaataaaattagtattgaaaatatcttgagaactagaatcaattccatcttcttgttcattatttagttcttttaaagtacaaggatgagttaattcaatattaatctccctacttcgatcataaacaatttcatttgatggtctatcatcagcgattgaccctcggaataaacgtaaagatttagctgcttttctaccagctatattgtttattgtctttgttgatagtttttgaggtgatgttgagtcagacgcagatttaacagtatttaaagatggattaatattcgtactagaattataatctacagttgaaggatcgatattattatgatccattggtaattgttataattagacaagtataattaaaaataataaaataataaaattataggttgaaaaggagaaatgatttaattattgtgcaatctttagggcaaaaagtgtgtgtatgtcgtaatattaataccattacataatgcgcgctatgctgatggatgccctaagagacatcagattaaattactatggagcatattttttttgtttttcaagcgcttattctcatagttaatatttgagatatcttttttctctcttctctacggactcgaatgtaactccacgtgctgtatatttatattattaaattactgcaataattaattttacttatcttcccactatgtttgtccctcttatttgatacattatggtggtattatttaatgttatttaggtagatgtagaacatcaaaattgagtgctaatgttttaaaagaataatattgtcacacatattttttgagattacatttatcccacttgacactttcaattacatgcttttttgagccctattatttttgatttaaatgcttttttgacactattcatgcattagtttttacaattacgtaagcaaaaacatgtgattgaagaaatgtccaaagtacagtctttcaagatttggtcggatggtctagttggttatggcatatgcttaacacgcataacgtccccagttcgatcctgggttcgatcacaatctaaatatttaagctttggtggcccagctggttaaggcgtcagtctcataatctgaagatcgcgagttcgaatctcgcctagagcaaagctttattttttaattaattttttgtttcccctttttttgctatgttataatgatgtgttactatttgagtatatgtgaaaaagggcatcattcatatttctacaatatcataatataatcaacagtgttgtgtttctataatcttttcatactttattttttgcttgttcttttcaaacataacgatctttgctttagaaagtgtactgtaataagttttaaaaatatttaacttaaaaaaatgaaattaaactgtaaattatgcttttcaacttttgtgcttttgaacacatgtcttgcaagtaaatttgtatctcaatctgaaaaaaagggtgaaacattagttacagatgttcaaccaaaatgtttcaaatctgaatataatattcgtacagctggtgatttggcagcaatttctgattgtgctgtaatttcaggaagcattcatgtttctgattttgattctgatactttatatttgggctcaattagggaggttaaaggcgatttgactgttaaaaattgtagttcattactccgaatggaaggtccatcattaaattcagttggtgggatgtttgaattaaatactttaaattcattaacatctctatcattcccaaaattagaaagtgtagaaacattaaaatggaaagtcttaccaattttaacgtttgttaactttgatagcggtattaaaaaaattaattcggttattatgtctgatacttcacttactggttttggtgggtttaatgttgaaacattaaaaactttaaatataaacaacaatagatttttagaaagaattgaatctaactgtctctgaaattacggaagagttgttaatttctgcaaatgcaagaaacataagagtttcattacctaacttagtttgggttaaaaccttaactgttaaggatacagaagatataaacctagaaagcttacaaattgttgaaaaaagtgccgatttcagtcataataaattcacaaagttagatctcccaaatatgaaatcaactggtaatacattaagtataattaataacaaaaacttgaaggatgttaattttgataaattatcagaagttggtggtggtttaatgattattgataatgaccaaatcgatgagattgattttttctcatcattaagatctgttggtggtgcaattgaatttcacggtaacattaaaagtaatcattttaatgacttaaaaattatcaaaggttctgccatcatgaaatcatcatcagaaagttttgattgtagtgattggatgaaaaatgaagttgcaagagttgttagaggtggtaaagttgagtgtggttcaggtaagtcatccacaactgaagtcttattagttgatgaatcaggtgagagtacacaaggtgagccaggtattaatgataacaataaaaatacttcaaataaagaaagtttctcaaaacaaaaaaacggagcaagttcaaattggactactttctctaaaaagttagcaatggttgtttccgtttactcatttggtattttactacaacttttatagtaattttaggtaaattaggttaatattatatagtttgagataaatctgagtcaagtatgcatacaagtaaaacagttttatatgataaagctatatgttcttatttacacatggttcatgttcaaaagaaaagaaacattttccggagataagcgaaaaaatattaataattttcagcgcaacacgaaaaaaaacgctgttagttgagattatggagaacattgatctagttagttaatgattaacttccttatcaacggtaatgatattcctcattagtgatattactgtatcattgtcagcatgaatgatgagtttctagaaaaaaacaatcatatctctggaactcagctattattatcagatgtatttttgagtgatgatgagaaaaatgagaacgtgaatgtgaatcaagtcaataacctcaaaaaaagggaattgactcaagggaatcctcagagaccagttaaagaaaacaagagaaaaagaaaaacattttcatgtgataattgcaggcaattgaaaacaaagtgcgttagtaatatactaggaggttgtgaaagatgcagtcggttgaaaattgaatgtaatctaagttctactaaaccgtatactagtagtgaaacaattgaaaagcttggaaatatatcagaaaccataaagagtgttgcaaacgagagtttaaaaaatgaatcagtaagattgaaaaatattgaagataatataataaagatgaaccaaaatatcgaatgtttagttgaaatgcagtcacaaacaaaaaacttgattaaaaatttagacaaaaacagtgtttcacagaataatacaggagatggaattccgcaatcagtcaattatttaaacaattcaaatcatagtgggattttcggtgtaaatttcaataaaaacgtaagttatgaaagaggaagacagttttcaaatgacggatctttgatgagtagtagtgataccgaaacaccaaatataggtagttttgttgaattaaaggcacagttaccacaaagaaaggataaatctgctccattgaatctaattgagagcgttgaaacaagtatttttggaaaaaatcttaatggtaatagaagtgcattttattagagcattagataagtttacggagttttatctgaaaaatgatgctctttgtttggaattatcgaaagaatttttagatttttcccattattatattatacctggtggaataagtgtgattgatagagaatatgttttagaacatccaatgattacatgtgtttttgtattgattgcaatggccaactcaaaggaatataaaaatagtgaaaaaatgtatgaagttgaacaattattgaagaatattttattcagtatcaacgacaaatatccactttctgatcatgatattgaagccattctctatatttgcatgtataatatttgtgacattgatctatggttgttgagtggaattggaataatgcacttctttatttcagtcgatttgaggagtattattgatagagttgtagataaggcaatttattttgacgatgatttatttcacttaaggatattgaactctctttgttcatgtcatcttgaatatgctgttgggaaaggaagaaatactcttataaatgaaattttatggaaggttcataggtttaagtattttatttcccaaagctactatcggagatgcaatccaagtctctaagttggatttttttcagaacttgattaagctgtatctgaaataatgattactttattgatttccagaacgataagatagatgaacaaaaagttgaagttaaagaactaagtaaatggaaacataaatggaaaaagattatagccaaggatgtgtcaaaaattactagctatacctatcattttggatacattttattatcaaggaagtatattgatacagcaggaaataatgatagtgataatgctagcaacaaactagcacttaaaacagctatagcacattcatttgatcttttagaaatatttgttcacacatcaatcgagtttattaaaaacattccagattttcaattacaagaaatagtctacgcatctttgacattaatggaatacttatcaaggatgaatgcaaatgaaaaggaacttactataagttacatctccaaaacttactggtatttaaataaaagaggacaggaaatgaatgatttgactaacacggttgctataattgttaaaaaattagttgaaatggcaggtgaagataaagaattacaaatttattcaaccgaagtaattgataaagggtttatcggttctggatcacatacaggtatgggccggtaccgggagttgagagtacgcgatacaccacagcagagaaggctttcacgggaggatttaccactattatcgtcagatacaacaaataatacgatagtcaatacagtcccacaattacctgatctagaaaacttcacatcattcgatgatttcttcaaagatctctttctaccccagggatgataacattatcttacaaattaaggtgcacgtcatcgattaaaagaaaatattcaagtgaaaaaaatggacgaaatgggcggtttttttttagaaacaattttttcggacatttccaattattgttgcttcacatttttgatttactaattctatcttatatcttttctgtacgattctcttggcactccaaccgtaacatatacaagtgaaaactaataactattttagatataagaaagtaacggtagtagaaaggattgatttttcacattttcttcactagctttaatcacctatccctcatatatagctcaaatgtccaataccttcaactagtacttaacttatataccctttaaacattataaatttctcgttcagaagccattttttttgaaaatgtcagtaaataattctacttttgctgaaacatcgaacaatctagtaaggaacaaaaatcaaaataaaaacacagtgttaaactaccctgaacagttccagaatctagcacaaaataataataatagaaacaatatagagtataataacttgatgttagagatggcaaactattcccctagcaatattctatcgtcatattcgaaaaagacgctggatcctacatttgtctcgactaataatcaccttaataataacaatatgatgccacaacaaataaaccagaaccagggatcaacaatatatcataacaaccaagcccaaaactctaataacaatactagaaatgctgtcaaccaatataccccggctaatacatatactgcttctcaaaatgaaaacagtgatacaagttttaattataaagatgaattaaaattaaatgtgaataacatacatcctaacacaatccatccaacatcacctaaacataacgatgaaacaatacccgagtatcatttttacaaaggtgatgaaactccaacatattcaagtgatggaaaattaattcaacccagatctccaacttatgatccaaattatcatcaagcgatattatcaatttcttctaatattcaagtcgatcataatgcaaatgtttcatcattcccatatgcattcactagacaaagcaggactttccctaactataaaccctttgaaactttaccttcaatgaattatagtgcaaatttgaatcaaaacttttcagtcccaatggaagcaataggcttaaactttcaggatagagccactaatgctgaacaagactggtttgataattttgatgatgatgatgctaatcaaatcattaaacagacaccacaaaatcaatctcttggcggtgaacctgctagaaaagcttatgtgtcaaatagcggcagtgacaatgattcaattgacctaactttggaaagagccgctacatctaaatacaccgataaaaatgataagaagacctcacaattgttgctactaacagcagccaaggatagagcgaagttcccatattctcaattagctaaacctataaaaaatcttggagagcaacttaaatcgaatgcacagatcaatacaaagaatcaaaagatagttaaaaatattgaatataaattgaaaaaggagcatcaattatttgcactagttacattaataagatcctttaaaatttcaagagattcattatgtcaaagaaatttggtttatttaaattactccaatatttgtaaaaagcataatattaaacccatttgcaatgctgcttttggtaaaatagttaaagtttttcatcctggtattaaaactagacgactgggagtcagaggttcaagtaaatacaattattgtggaatgagattgattgatgaatctaatgcaagcttgagtgaattgaacgatcaagaattatctgcttctaatacagacacagaaataaattcaaatgttaagggtttatctgattcatctttgaaaacttctagctcacccagtaatgaaacaaacccaacatccatggaatcaccatcagacttgaaaataccccggaataaaacatttttgaaacctgagatttttgataagttagtgtttgatcaacagatgttttacgatattgaacatcaaacggaatttgttcctaattttgatcgcatattcgctaaaattgataatgtgaaacataaagagttcttaaaaatatactgtgatgtgttaacctctcttgttgattgctggagatatattagatttgaatcattgtttaaaaaaatggctacatttaatagtttagattttttaccaaaagatctagcagatgtttttgaaagagataatgaggttttattagagcttacacatcaatgtgatttggaagcattcaggatatccattcagttgattaccaaagtcacatttcaatatgttccagattttgttcaaagcgcatttgaaacttttgaaaatgaatatctcaattttattcatcaacagaaaaacattattttctttgataaaaaaaataatgttaatttgagatttctttacattatcagatccttgggtagggttttatttttatcctctaattttgtaaaactattataccttgatgaagacaaaaagtataatccagaaagtcaaaactatacaactatcaatagcttcaaaaaggaatttgctgctttagattttagaaggataatttgtaattgtccattaattccattaaatgtcaaagatcagttaatcaaacttattttgagtaatgttgaaggtatcgtcaaagctctggaaaatcaaaagcaatcaaactgtgcttatagagattcgttagtgaatggaatctctaagatttttctgtatatctcagatcaatttactgatatagatcctcgtgatttactgttatacattggcgcattcagccaagctgtattaagagaaattactatcgaacattcaactcaacacttctcactttggtggtcaataacatgttggtgtgatgaatatcttttactcctcggtgaaattggaagttttcttcacgatattccaaattcacatctagcttaaaatttaaccgcttttctccccttttttaattcccttttcaaacattatattacttgtactctttgtttatgctttaaaaacttatttatacattgtaaaagcaagtaaatatggacttggaactgtataaaagatttattaatgtttgtagaactctatgcatgaattcaccagatattcctggtaatcttttccaaacttttattgaagaaagaattaatggtgtaagttttgagaaatttttcaacactgggagcactaatttaagcaagcatatttctttcattaactacaataatgattttcataacaatgatagtttaaataaggaaaatgatttttttatcagattgaagaacccagagagcaggaatagtaaagaaagaggattaaaagtttgtatgtttaataacaatgtttttaaggaaaaatctataaatgccggaacaaacatgtttaaatttgttccaatgattaaagtaattggtttaattaacaataattgtgctgaatgtgggaaatttttatgtgatattgtaggagatggtgacggtgttaaaaaggaaattaaatgtgatacatgcgattttagaaaattttgtggtgaagaatgtaaaatgaaagcaatgcttgattggcataatatcgaatgtgaatttattaaatttattcaaaaagagattgttgtagttgattctattactagaagtaaaaagcaaggatggaaaaaagatgatcttgaaatggatcaaaactttgagaaaacagttttacttgtcacaacaattttcagattacttgtttgtttggctaaaaatgatgattatgtactaaatatgatttgtaatatgagtgatcatcttaaaatttacaagaattatatccaaacaggaaaatatgagtgtattgaacacaaggaagtttttgatgatacaaagaatacatttgtaccattgattaaactattttttgataccaatctaaaaaaaatagttagtgatagtaataggagtggtgggttaccatcaattaatgaaaatggaatttataaggcatgttttttagtctatgttaatatttcaacagtaatggatcatttgaataataatcttggtatgatgtttgatccattattttcaatgataaatcatagttgtgatcctaattgcacattagtttataagaatgatggtgaaataatggttaagactaccaaaaagctgaaagcatcaaatgaaatgcttttgaattatattccagtctttttaccaagagaaattagaaggaaaaagcttaaagcctcatttttttttgattgtgaatgttataaatgcacagttatggataaaaagtttgatgatatgctaccaattaattgcacatattgtggaacgcttaataaaggatttttattagagaattttgcaatttatgatagtttaccaaagtttgctaaaaagattacatgtttaaattgtgaaaatataattgaggttgaatttatttttaaaaaatatcttgaaatgtttcaattttttaaagagatcaatcctgaatctgaaaacattgaagatttgaagggatgggatagtgaagcaatcaattggaaaactttaacagatatgcaatttaataaatgtgttatgatattcaaaactagttatggtattgtaccattgaagtcatggccaatgaactttattattaatattatcaaaaatgaagtacaaataaggaataacaatatagttaatattacatgtttaagattaacatatttaagtaactttttaattgagaatatgttggagagaaaaagtattttcaaaacaatgattggttcatcattgtatgatttagccgttatatcagcagagtatttatttgatcaatatttacataagaagacaatgattgaaaagatattacttgaaagtattggatggggtacattttcaatatgtattttatcatttaagcatttaagtattaggttttctagcagattagaaaaagacaatgattataatagtgattcttttaatgaagttttggagagatcacaaaatgatatgatccaacttgcaggagaggttaaacgattattagagttctgtaaatgtaattacggagataatggtagcaaggatgttaatttgttcaaggaacattacttagagcagagtctttctaaatatgaatcctttattgattgtggaattaagaaacaacttttaggagttgtgatacctttgagtgatagagatatttcacactttggactcaaaagagagatggagatggaagataaagaagcagagtctcaggattttgagaatactaagagacatgccaatacttacgtaagaccacaacaagaagaaattgataagttgagccccctatttgaaacaccgcaatggataacgaaattatgaaattttagaaaatttatttcattacgtagtgtttattattaatttactcccaaggtgatgttgttttgatgtaattttagttgtttatttttttagcttttatgcatgatttttcattctattctttattcttttatacttttttctttccttttcactaataatataatataatagtagtataatatacacatataatttatagaaattaattatttgctttttgctcatgtttgttggtacagcccccctgctatcaacgcagaatactgaaattttggagctgctggcaactccaacaactaatcatttccttccaccacccacattaccaattacttcaacagatattgatcaagatgatccagttacaatttatacacaagctgcatcaacggatacacatcccacctttgaattgattgttccaacaattacaacaaattcatttccttcgggatatgcacctattaatatatcatcagcatattctcataataattataattctaattctaattattattctaattataattataattctacatatcaaatatctggaaagagttcatcatatctttcacgaataagttctcaatctttaatacccatatacagtgatcccgaatatccatcatcaacaacaacttcttcgttaataaaatctttcaaaacatccctcaaaccttcaagatcattttatattacaacttcaacaacttcatcgtcatcatcttcttcatcatcttcatctttatcatcatctaaaagtaccaaaactgttactgaatttcttgaagatgttacatatacacaggtatatgtcgttactgattctcaaactactataactacatcattattagcaacaactacattctatgttgattcattaagttctacatatataatatcaccacctgcaataacaacggatattaatgcactgaaatcaagacctgattttttatgttatcctctaatcatggattaagtcatggttcaatagcaggtatagttattgcactcgtatttggtcttggctttgtatcattattgttatactatttatttaagaaaaatccattctgggaaaaacataattttatcaacttcataatcggatctcataaagatagtcctgataatatttattctgagaaatcaatggctcctaacagcaaaacttttgaaaatccaatgataattttatcacaaagtgatttaaattcaaatgaatcattccaaacacctccattaatcaataggaataataaaccaaatatttttaactcgccagaaaaacaattaaaaccattagatatcaacaatgctaacaataccaataatattaatgatgacgatttagatatgagtttatttgatatgcatacagcatttagtgaaattaattcatcaactaaaaataataattatattttaccaccaattccagaatcaaggaaaaattcaaattctaatagtattaatagtattaatacaatgaattatcaggaaattgcaagttcacctaaaactccattgaatcttaaacttcccatagatagaactatgggagttttatatgaatcaccaaatgaacaatgtgtctgggatgaattttcaactgcaaaagattcaggtatgttaaatcctaatcttaataataataaaaataatcaaaatttcaattcaattgattcaccaattaattctatatttaattcgccattatattcaccagctaattctccaagtggttcacctttacgttcaacttttgataatgaaaatttgaatttcaataacaataacaatacgaataataattctaatagaaattcaaaatcaactcattatatgcaacaattaaatattaataatgattatgatgattcattaagagccaatatattgagttctaatagagttagatccggtagtggagcaacaagatatgattatattgcaaatagtgtcaatacatttaaatttgaacttgaaaaggaaagattagcatcaccactgaaaactaattttgatcttaatgaacttgatgattatgatgatgtttctgatcccttaaaattaccaccacctgtaccacaaccaagaaaaaatgtacattaataaacacatatgtcatttatacaaattcaattctctacgtttgctgtatataataattacagattacaattacaattattttaaattttacttatttaaaaattaacttgttatccactctttataaaattatttttcttatttatgtattttatattcaaaaaaaaacttaacttatagcttcaccaataaataacaaaagaaacaaaaaaaacccaaaatattaaaagaaccaaagaaaacccaaaaagaaaaaaaaaacccaaacccaaacctaaaccttaaagaaagccatagtaaaatattttataaatcaaaaagaacaaatcattttggaattttgtaatcatctaataaattcatttcaataacaaatttaccaactttatacctttcatgaacagatacacttgtaatatatttccatccaagattaatattacattgaatacaataaattgctttaataccatattcaccagttctcataattttcataacttcttgatcatcaagtctaacattaattacattatcaacaaaataagctaaaccattattaccccaaaaatcttttgaattaattaatgatgaatgacaaatatctgatgaacatgatttacatctgtaaatggaacatgctttagattttgatgattttttggattttttattactgctactgtaagccaatgaattatcattttctgaatccgaatttgtatgtaaatcactttcatcattatgagtgtctacgattacatgataagcatcatcattctcatcctcctcatcgtcgtcttcttcctcatcattatcaacttcttccataaaatcatcatcatcttcttcatcatcatcatcatcttcatcctcatcctcatccacttcttcatcatcatcttcatcttgctcttcaattacatgttcaaaatttcttccatcaatatgatcatgaataaatctttgagttaataaactagtaaaagcagttctatcaattgttatattattaaaattttctgaatgattaatattaaaacgtacacattgactaggtttattattaccgatttgagccttttgctcttttccataatcatcttccttatcaatatcattcgagaaaagttcatttttatttcttaaatttattgaatataaagtactaaaatcaaatgaattacgatgatgaatatgggaatttgatgaagatcgtggtgttaatgaataattataggtataattaaaattatgttcattatcattatcattactattaattgaataaattgaagaaattgaagatctactaagactaagtcttctatttttatttaacttttcattatgaatttccttatctgagtaataatcattagtatgattatagaagtttgatattaatttattattatttgaattagaggaagtaacggataaagacatgggaactggtgagtcagtttcctttaaatcaaatgcgtcaacacacactctacccataactttcccgtgtttaaagaaaagaaagcaagttaaattaaaatgaaataaatcaaattaaaattaattaattaattaatcggtataactaataaaatatacttcccactccttaaaatagataaccgagcctccaatcagtcctcgcgacgatgcgtcggcggctattttaaatttctcaatttaatttaatttaattttttttctttctcagttttctcaacatgaattagtttgaataatcaatcaattgcagttagaggtttcaattacataggatttcagttactgtttctattttactatccaacaatggttctaacttttacacgcctgcctaatactttaacctcctttaggaatgctattgcattttcaaataaagtaagatttttggcaactaaacctgcagattccctgtttagtgatttaacaaaatcagttgatgaaaagaataaacttaataaaaataataataataattcagttgcagttgctgatgaaaatgatgcggcaactattcaatatgtttcacctgaaaatgattcaaaattacaagaatttcttaatccaaaaccttatttaacaataaatactttgttgactccattaaagagagaaatttatttagcaaatgtttccaaaaatggatttttcaaaaataatgaattaactaaattaaaggatggtaattcttatactcttaaattaacaaatgatcaaattcaagctcttgaaccttcaatttatcttagatcttggagaattaaagcatcaattaaaaaaactaatattgtacttagagctttaaaagatttacctttaaagaaagcaattactcaacttcattttatggaaaagaaagttgctagagatttagttgaaatgttagaaagaggtgttaaagatgcagaaaaaatgaattataatgttgatgatttatatattgcagagtcttgggttcatactgatggtagttgggttaaaagagttgattgtaaaggtagaggtagagctggtgttcttactttcaaatgggttagtgttagattcttattaaaaacaaaacaaacaaagaatagattagcttatttagctaataagagagatagtcaaaaatctgtaagtagttttattacaaatggtaaaattagaggtaatgcaccaggtttttacagatggtaagttaatatatgtcatatacctctctttgttttagattatagttacttatattgctatattattataatttaaccatcatgtaaatagataaatcttttttataaaaataaatttcgaataaaagaaatcatatttcgatattataataattgcatttactgtacagtttttttctttattaattgctttttttaaaaaaaaatcatcttataagtaataaatagtgttgttataaagcgttgaatgaatcatttgaattacacaaagtaaaaatttcgtattataattataattataaattatatttctggtattatttgttgtatttaatttaactttaatacgtgagaatctaatcttcataaccttgtggtggagatctagctctatttggaattggataaccatctaatggtaatggagctgcatctgcatataaaaactttcttcttaatggagtacctgcgaaaaggaaaactggtccaaggaatgcaataaaacctgaaaaaaaaagatgtggcttattatgtgcttggtaacgtaaccatctaacaggttccttaaagtaaacaggataagacatgtctatttgagtagtttcttgatattttacaaagacgaatcttttatactgtaacaaactaaggtcttcaattcctctaacagtgaatcccctcacttttccaattttctagttataagtaaagtaagtattaaagtgtccgacccagcgaccgcaacatgttttcttactttatatggtattcactgtcccttacttatagacacagggagaagaacacagcaacaattcagtagatatggagaagcaatatagtgtgatacctaagggacctcgtcgattgggtggtagatttgaaagacgtgatagatcaggtcgtgattttaaaagaggtgactataaatacagagatgataaatacagagatgatagatcaagagatgacaggaggaattatcacagaactagtcgtaggaatgatgattcaagatatgaaacctcaattgctaaaccaaaacgtatagatccaagaccatcaggaatactcgttaaatatgcagatttccagagagctccatcaagtcaaaaattaacagttatagatacattgaataaatatacaccaccagaagatgaaattattcccactaaggaaaattgtaattatcatttgtttaaatataatgaagatactgaaaaaacaaatagaaataccattatacaattttaaatcatttttcatatttggtagagacaaggaattatcagatatagtaattgatgaagagacagaagatggtgatttagtatctaaacaacatgcagctttacaatttagaaaaaataaggattctgataatagcgttacctgttatataattgatttgggatcaacaaatggtatatttttaaacggatctgaagttgagttacctaagaaaagatacatacaattgaaaaataaagattatttcaaactgggtgattacgatagtattttagaattcacagttattcaagatatataatagaatagaatatattagagtaaatcattaaacatttatagaaattacattatgttaattatgaatttaaaattgagacaattgttgattgacaccttcattgaaaatatcaagccattttgaattaactgaatgaagagctaaattagcacctccttttggtgtacttataacattcatcgcaaacagacttagaacagcagattggcatggttgatcaaaatatgcattttcaaataactcaacatcatcattaggtttttcaataactctttgatttttttgtgattcttttaaattacctaaattagatactaataatgtacttatcattgagttatcataacattgctttctctgttcgagaaaaattttagtgtcaaccaaacttgttaatcctaaatctctttgagaatttgcaaaactattatgaatataatcgttaatatatttaacaaaactccaattaatttgaccatttctacacattttagtaactggtggtaattctaaatttaagtcaccaagataaagaccaaaatcttttctaactttttcatccttaattttatctcttgaatttacaggtataacaaccattgtatccttttcatcaccagtgatttgagaaattgataatagtgacataacaaccaataaatgatgttaatttcaccttgtatttacgacagtcagatattaaggtttgtaacttttcttgtgaaatatgaactaatttacaatgatctttattattattcagttgaatcatctttttagataatgatatcatattataagttctacttttggaaatatctccatcatcaataaaatagtatttaataagatttatcaagcatttagggaagcatattaacataatgacataaagcaaataaactaaaggaattgaataatcaattaaatctgatggttttggagcaaggtttaaagtattgatgttcttatcaatatcaaataatatgtcattcattctatcatccatcgagcatattttgtggttaagatatttcttcttttcattatattcactgaaatactttgaaaaaacacgatgaaagttcaaaccggaagaaccatcgaaaagtaaatgatcactataataaaccaaagttttcttgttcaataatattaaagaccataaaggtttatctgtactatatttgaaatgaacattttgtaaatcattgaaaacattagtaactgataatgattcgtcattaacaattttcaaaacatcattaagtttatatttatccatgaatttaagataataaggaaattgaagccatggtataaaatgttttttcttataagcattcattgaaagacttgaatgttctttaaccatttcctttaatgcataatatattccatcaatgtcaagttcttcagtatattccacagcaacacggaaatttgagtacatgtttaatttattcctccagaaataatatttttcaaaaggtgtaaaccctcttgagcattgtactgtattttcaggtaatgaatcagatacgccaaccaaaggcattatttacggttatttaattcgtatttatgaaatgtacatgttataatttataaatctaaattattcaatctaagtaatcttctaataataaacaaagacggcaaagaaggataatttcaagtgagttttatttacgacccaatactctatttatctttttattacttgtgtctattaaataataaaaaagataaaacagagaaggtatttcaaaaacgtggtgggtgccccatattataatttagtattgctgtttttggtatgatctcaaactccgatgtttacaaattttcactttcgtgtttgtttatgtccgatctttttattttaacttttataacttatcagtgcctttggctttacctgatcctacatccattttagcactcttactaccaaattgaatagctctcttagcttcctgtgagacaaaatcaagtttcatatatttagctaattctctaagtgccagtttacgtgtaatttcacctgtttcttcattaaaatttagcttcatagttaatggaattttacccatacttgtacaccattcattcaattcttcatctaagaatggatatcttgcttccttattccaacatgaaataactttatcatctctcattaaattacgttcccataatctatcaatatcaacttgtaattcatctcttaattctttttgtaattcattaatatcataaatagtttcatccttaactggtttaccttgtaatttacgacgaatttgattacttataccagtaaaaattctttcatgacgtgtataacctccaaaaatttcatcagctccaagtccacttaataatactttacaattactatctttaccttcagagtttttaccacttgttgcaaaataaaatgcaattgcaattgataaatccatttctgtatcatttggataaattaaatctataacacgttgttttgcttttaagtattcatcatatggtacattcactttaatcagattaaaataaactccttttttattataaacttgattcaattcattacaattttttattgctaacattcgatcaggagtttcatcataacttaaatttgcacgtggattactaaatgaaacattaagtaaatcgatcgttgtattttgttcacataattctccacataatccacaaattaatgtacaatctattccaccactgaaaaggactgcaaacttactatctgttttatctttctccaatgggaaaattgttgaaattcttctttttacagcttttgataatttttcatgtagttcagtaattatttcatcttgattataagtgatctctctattataatcatttagaacatttaaaaaatttggtaagtcatgagattcattgaatgaatcccatcctaaaactctactcactatatcataataataaaccattcctttttcacattctttaaattttgttctttttgatttattggttgggaaacaactacttatatatacatcacccatttcatcatcagaaaagcataaagattttctaccaaaagcatctttaccaaaataaaatattgattctaatgtatcatagattgtaaaggcaaattcaccttttaatgatccaatagttttatgaacatttccttcattttttattaataaatgatgtaaaaattcaacatcattcatattttctgatatttcatcattatataattcaccattaaattgaataacaaaacgttcgtcaattaaaggttgttttaccagtggttgacgtaatgaaagtacacttgaatataattttatatcatcaacatgtgttgaacgttcataatcaccacctctttcacgaattattgggatgagtgatttaaatagcgtatcctcaccataatcatcgtagttattacttgatccttcactgtagtgaaacaatatcccacacatacgttattatacccaatttcttaaaagaaaagaaagaagatgttgacaaattaattttttcactcataaagaaggtggctcaacaataacctacttgaaaaaaataacttgcaatatattagtgagagaaaataccataatatacaataaaaaaactctatacacttaattaattaattcatcaataatattttcaatctttgaagcaaatccatcaatccattcttcattacaacatcttaaaactaaattacatccttcctttgtactaattgaattcattgcaaatatttgactcttttgatcaaaccatgcatgcttaatacttggtatattatctgaaattttaccaatattagaaatttcaaatgtacattgattataatcactatatctttcaaaaacatattgtttaatatcagtaaattttaataattcccatgctgttgcagcatttggtaatccttcatgaattgtttcattaacaaatttaacagtttcccaattaattttatcatttatacaaattttctttgatgatggtaaattaacattaacactaccaacataattaccaaaagttgatgtgaaatttggattcaaattatacgcctttttttcatcaatcaaaaatcgaatatcaactggaataactatattagaatccctaccttgttcaccaataaattttcctaaactaatatgtgaaatagttattaataatgctgttaatttaacatcatttaatttacaaacttttaataatgaatctaatttatccttatttaaatgaacaattcttgaactacttgccttttctgggatgagtgcacattctctatagcttaatgtatcatagcttaaaattttagcatatttatggccatcaaataaatatttaatccaattagaaattgatttgggtgctaatgctaatataagtctatagataagactcaatcttgtaccttcatatttaattaaatcggtaggacttggaagaactaaatattcctttggatcaatttcaaatttttgaaatacaactgaatctaaacctttaaaaaattgtgctgcaattggtggaattccttgacctataattttagcaaactcagtatggaaatttttacctgaagtaccatcaaataatacatgatcacaaaaaaataaagcgtatttttcattaataatagttaatttccataatggtttattgttagaatatttaaactttgtattaatgtaattatctagaattttatttggtgtaagagtttcatcattgataaattcaacaacatcactaaatttaacttcatccactaaacctaaaccataaccaaactctgtattttcaattggaaaaacatcagtaacgaaaacactatatttataacataaaagtgaaactgcatgataaactaaagcaggtgttaacttaatggaatgttcagataaaactctaaaacctgaaaaaaatccaagttttgttctccaaaagaaaaacttttccggtaataccaactctctcttatcactaaacatgtttgtgaattcatgaaagaagcaaagaacgaatatcaatgcaaattaaaaaaaaacgtataaacgtaaaactgatctgaaagtataatagttagttaaactcagtaacgggttatccaaaactatgttatgtgtcccaaagaggcaattgaagcgaacatgtcttttcacattgataatcacactgttgttttaagcaatggttgccaatatgcattccttatagagtagtaaatccattttacaggacactatctatataaatcatgtctacagggaaaaagcttttgcttatgggtcgttcaggctctggtaaatcttcaatgagatcaattattttctccaattattcggcattcgatacgagaagattaggtgcaacaattgatgttgaacattcaaatttaagatttttaaataatatgacacttaatttatgggattgtggtggacaagatgtctttatggataattttttgaatggtgcaggtggtaatgaaagtaataataataataattcaggtttcacaaataatattttcaaaaaatgtgaagttttaattcatgttttcgatgttgaaagtaaagaagttgcaaaagatatcaatacttttaaaagagttttagaaaatttaagtaaatattctccaaaagttaaaatcttcatattaattcataaaattgatttagttcaatcaaataaaagacaagaactattccaacttatgtataataatttgaaaaatatagcattaaatgaatatggttttgatataacaggttttgcaacttcaatttgggatgaaagtttatataaagcatggtcatcaattgtttgttcacttataccaaatgtttcaatatatgaacaacatttagctaaattaaataaaatattaaatgccaaagaaataatactatttgagaaaactacgtttttagttatatcatcaatggatagattgaagagtaatataggtagtgcatcaacaccatcactaaccgggattgaaaatttatcatcaactgaaaacttagatcctaaacgatttgaaaaaatttcaaatataattaagacttataaacaaagtgtcaataaaataagatctaattttaaacttttaattttacatggtaaggatacatcaatatatttagatgttttaacttcaaatatttatataatggttattatggataataatattggtaaagatgaaaattatgaagttagaaatgaaagtttaatacttgaagatattaaaattgctagacatctatttgaaagtatagaaaataaaccacccgtttgattgatattatacaacttatctctatgtattttatataaatatttctattacttataagaatataaaattataaaaacatttaaataaaatcttataaatagaactttctcttgtccttttccaattctggtttgtattcccaatcaatatcttgtctaatacctttttgaattcttcttaattttaatgtaaattgaggtccaagttcttgtaatccaactttttcttcatttctgaaaatataacgatgcattctaaagaaaatataatctctttggttatgtaatgtaacaacttgtctaccttcaaattcaggtttgtgtgggaataatgattgaaataatcttgaaactgattgacctaatctagttgtaaagttatttaaaacaagttcaggaacatgacctgttggttgtccatgacctgtaattttctttctttcaactaatgaagttatactaaaataaaatgtgggtccctcgggtaagtgtacaaatgttataccattaacaacttttttatcttcatttataacaattaaatcagtaaaatctcgatttgaacaatattctgccatatcctttattgtatattttctttgccttttaacaaatgttgaatttggtaaaatttcacacatcattgcagaaaattcatatgcaggtctctttgcatttgcatttgttgtaatcaaaacttttggttcttgaccatcttcaaaataactatcaaaattatcttcaccttccatatcaacattaacggtttcatcataaactcttttggaatcaattgtatctggaatattctctgcaagtcttttctcctttaattcaggattgtcacgttcttcacgagctcttgcttgacgttccttatgacgagttgtattatgttcatgttttaattgtgcaaataattgctgtcttttctgtttgtttttaattgtctttaatgtctgtgaatcaacaacccccatttctttgattatttgaagcctttacttgttaaaaatttaaaagaatatgatcaaaaactgttatcaataaatcattttagtttaaaaaaattttgatgaaaaaaaaattttagtccattgctaacacagatattgcggaataatgaaatctccagcttactaaatttttactaattaatttgatttacaaactattaaaagttatatttatgtagattatacaataatcaccacacatcttcttgatatctattattaactcttaattgtttaaccatgtttgatgcgatttcttcagtaactttcttttcatctttgaaaatttgtattaaagttttttgaacactctttgccatatttgcagcatcaccacaaacatagaagaatgcacctttattaattaattctataacttttgaggaattttctaataatttatcttgaacgtatactttcttttcagtttcccttgaaaatgcagtaatcattttgaattttgaatctaattttttagaatattcagtccattcatccttatataggaaatcttcatcagattttctacatccataaaagaataaaatttcaccaacatttttattaccattttcaacttgtttaactttttctctaatgaaacctctaaatggtgcagcaccggtacctggaccaaccattataattggagttgaaggatttgatggtaatttgaatgttgatcttctaatatgaattggaagtttattatgaaacatatttcttgggccctctaaatcatatgtttcaataagtttcaaatcaccatctttattttgtttttgtttaatatttaataacaaatttgttgttacacctgtaataaatttatctgatggatccttaattttttcttgttcaacaactgcagttatatgaattgtttgcttttccattcctgaagctgaagaaattgaataataacgaggttgtaatttagcaattgattcaattatgaatgaaaacggaactgaattccatttaacatttttacttaaataacttaaacaatctgcaatatcaaaatattttgttgtaatactattatgaaagttttctttatgacctgcaattttttcaacttcaactttagtttcctcatttggacaaaattgtgaaatggattgtataaattgtcttgaaactggacctgaaatttctaaataatgtcttaaaacagtatcataagttgttggagttgggaatggtaaatgtaatgttgaatctaatgattttaaatcaataactgtatcccttttatttattaaatctaaaatatttaataatttatcaactttttcatttgaatttgatggccaaattgcaatatgatcaccagttgaatatttcaaatttgtatttgataaatcaaattctgcatgaatacaatgtcttgaatttgaattgaataattctttagtattttgaactggtgctaaataaggatgagtatgatcaaatggtccatattttaagaaatttaattcatcatcagattttgcattaacataatgtttatttggttcacctaatgaaacagttaaatctgatttatccatttcaagtttttctgaaacttcaatagctggttgatacttaactgcttgttcctttaactttaaagtatctttaattgtatcaaataaagtttccttccaagccagataatcttcatccattgtaccagtaccatcatcacctaatcctaattccccaattaaaattgcacctttttcctttaattcatcaacagttttttgaccaattgcattataaaattcataagttgaattacctaaaccaaaacaaacaaatttaatacctgataaatcatcacattcatttgctaaataatcaaaaaaatcaactgcattatcggttggttcaccttcaccataagttgccataaagaaagcggcaatttcaaaatctggtatttcattattaatattttgaaaattttcaaatgaaacatcagctaaatctgctgtcattgttggcacattgaattttgattgaaattcttttgaaaatttcaaagaataatcctcagctgtaccagtttgagaaccataaaagactacagctctcttatttgaatttttcataatttcaaccaaatcatttgaagtagtttttggacctgatgaggaatcgtaattcgaagatttattattaccaccccaaagtttatccttagtagtataagcaataagagcaattaaaattgctataagcactgatagatctaaaacatccattgtttatactgatcaaaacccaaggacaaaacgaagcaaaagaaaagaggttgaaccttaaaagtaaaataaatatacgatatcagattcttcatcactgttaaacacgccacaaggggaaattgtatacgagaatgattttttctaaatttttcactctgatatataccgataagacctcctattcattcggatgatctgaatctgaaatattattatactgcttatttatacaaattataattcaaaattagagtaaacactggcacttaattcatctaatcctggaacattgttcattgcctgtaatacaggattatcaatacgacgatttattaattcttgtgtttgtggtgttaaaactgctagaataaatgcaagtttccaactatttggttcattactatcttgttcctttaaacttctcttattcatcaatgaatgatataaactatctaaaattgatgatatacctgagctaacaatatttctcgtaacattacttatcatttcactatccaaatatccctttagttcactattcattctctgtaatgtttccatattagtaatattactattaaaacttgctaaaaattcaactgtatttgttcttttaagtaattcaaattcatcattacttgatggtaataataatgaagttattaataatgtttgtttattttcattctccttttcatttacattttcatataattcatattcatatttagtttgaaataatttaatatcaatagatttttgaacttcaacaattaaattactaaatttctccattgttaattcctctctcaaattaacttcgttgaaaacaacttcaacactttccgttattgttttattcaaattggcccatcccttatttaataaccaccatgtaaatgataaaaatgcctgttctggtaaatctttttcattatttccatcattttccttttcttcatctaaatcaattaattgaattccttgattcctggatgctagtttaattgctgtctttaaatatgattttcttgatataatatttaattgtaaatgtaataataaaatcaataatgtttcactataaactaatgttaaaaatctggttaatgattttgttttaagttctttccataattcaactttacttttaatattacttttagtattagtgtcggtactactactattaacatcatttattagatggaagtcattagaagtttcagatgttgtaaccgcacttcccaagtctgtactgttattatcacttctattatcagataagtttctcttatttctaataagttttagttctttagttatatcttcaacattcaattctttataaattgggtcaataagaactggcaagaatgataaaaatgtcatataacaatctttttgagtttgagaaaatcttttcttaattaattcacgagttgcattctcctcttttaattgatcttgaaaatcctttattttattcttaatataaataccaattaaataagatacaactgcaactcctgatgtaattaagaactttttcttatgacgggtatatatatctctaacgtacttaaacatgcttgttaaaaagaagaagtaatcacaaaattgaatccacaatatattaccattattgatcacaatatccttatcataaaaaatattgttctgtggggggtgtttcatgcgacttaacgaccttttcataattatcttgttaaaaaaaaaaaaaaaatgtaattacagcctttacgactacacatgcgttagcatgtaatggctacatgccaatgtctttatctacaatctaaaatctacatcaagataagtagaaactattactaacgtaaaattgatcttttgttctatattaatttacacaataatcatttcttattcttattcttacttttatttttattcttattcttatggattttactatttgaatcatctatcttatcagaagataacttgctattattattatttttaggtttctttttacttgagtctttactattctttgcatcaacaattaacttttcttcttcattattgaatcgtacatgactaccaaaatgtgtcttcgaaactgctggttcattacccgttacacctatatgtttcttaataaaattttcactctctctttctttcctttgttctttagtctcttttttcaaaaattgatcttctgcaagtttaactttatccatatattctttcacacgtttaatttcaaacattattggtgattcattatttattttatcaccacaaagtttcagacttgtaaaatataaacttacaagtatatatgaataaatgtttaataattttgcttgttcaagttcactttaatgtttcggtatgttcaatctctccaattttagaaatttcttcaagtgattcaatcaatgttttatcaactaaattatcctttattgattcggtgattgaattcacaagttcattaagattaccaagtaatttattgacaccctctacctccattcttatctttgtattaatgataaaacgatacttagtatctcaatttcaatataactaaatctttaatgggcctgtgatatagaggttgaaaaaaaaaatatttttcctttaacttagtagtcaaaaaaatattaaaaaaataaatgccacttgccagaattgaactagcgacctctgcattacaagtgcaacgctctaccactaagctaaagaggcatatatttttgtaaactaaaatatgtaagatagtggataatacttaattacgtaatggaagtaataagtataaaataagtttactcgttggaccttttatttgtgtaatagacagcgagtagcaatgagacggttggtattaattagtagattgttctctaactaatactctgattaatgtcccctctcagaagagagttatacaaagttatacaggatatcatacttatttatattacaatattaaccattccttaatatagttaattaaactattccttatcaatcataccactccttatcataattaattcaatttcaatctaagtcattcctttcttactccgacatctccgaacctccgtatctcggaattcctatttccatcttatcatctttacgtaatcagcttacctaatcttcacgtggatattattgaacaacttgtatttattcccttacattaccccggctgttgggaaacatcgtccctgatgttaaaattaaattaaatcaaatacttaaacaatttgctcatgagcacaaatcatcttggcattatgaaataaactatgacgaagtgattccgaagccgtattaaattgatcagcagtaatagttgtagcaagtaaaggatcacaatctctccaataaacatcaaaagtattcttttcttcatcaaaaccagcaataccacacatttgattaattcttgataaaatttcagcattagttctaggtggacgacataataaatcgactggaggaacatatggacgaaaatttttaatatttaatactctatcctttttattaatcttaggtaaatcaacttcaaaagcattatcattaatttttttcaccaatctaaatggaccataataagcaggttgaattttataatatttagcaaaagcaccaaaagcatcacgatgcaataaaatataatcaccaactttataattatgaaatctatgtgatctattatgatatttttcattcaatctttgagcttgtacaatattatcttgagcttgagttaaagttaatctcatacgtctagcatattcttgagcatttggactatatctattatcatctaaattccaactattaacacttttcatagaatctggtttatatcctatagctaattcaaaaggagaacatttaattgaatcatggtaagtactattataagcaaattcacacattggtaaaaattcatcccagtgtaaatgatcatttgaacaatgttttcttaataattgatttaaaactttattaactctttcagtttgaccatcagtttgtggatgattagtagttgaaaacaataaagaaacaccaaagaaaaaatgaatagtataccaaaatttattcataaacctaatatctttatcactagttaatctttttggaaatccatgatgtttaagaaaataatctaaaaataatttagcacaaccttcagcagttaaagttttcacagttggaataaaatgtgacatttttgaaaatctatcagtaataaccataatcatatcatgatttgaagtagttgttggcaaaccagtaacaaaatccattgtaacatcagtccatctaccttcaggaacaggtaatggttgaaataatccttgagttttctgagtagaagtgttattttgttgacaaacaatgcatctattgcaataccttttaattgtaggcatcatattaaaccaaaataatgaatccattaaagtttgataagttttccaaggaccaaaatgaccagaagtaggattattatgagcatttttaataaatctttgaggtaaactattataacgaggaataactaatctattgcaatcttgttctaataatgttttataataaagtaaatcatttttaagttgataatgtttaatatggtggtttaaatgaataggaatttcagatttatttttcaaagttgaataaacatcagcaagtacattatcttttttataacctttaataattaaattctttaattcatcattcataggaaaagtagtaacagtaacttcagtattattaatttgaatattattatttgaatttctatttgaattacctaaaaatttaatatgattaacttctaaagcatctttaacagacaatttttcatatggataacgacttaaagcatctgcggcagaattatctttacctgcaacatattgaatttcaaaatcatattgtgataaataatcaagccatcttgcaaccctagttgaatcaatcaaattttgatagcgtagataaattaaacttttatgatcagtaacaataacaaaatgtctacctaataaataatatctccaatttttcaaagcttctacaactgccataaattctctatcataaataccataatttaattgagctcctattaatttcttagaaccataagcaattgtacctcttgttttaccattttcatctaattgttctaaagtataacctaaagcactaccacaagcatcagtatgaacaacataagtacaatcattattccattttggatgtactagaataggactgttaattaaagcgtctttaagttgattaaaagcattagtttgttcatcttcccattttgattctttggtaataaatttatgaattggtacagcaatcttagaatgattcttgataaaacgtctataatatgaagttaaacctataaacatttgagcttctttgacagtagttggaattggccaatttttaaccttttcaattttatctggatcagttttaattccatttttagtaataacatgacctaaaaatcttaattcatcgtaaaagaaggcacactttgatttcttagcaattaaatgatgttctcttaatgtagataaaacacttttaatatcttcataatgttgcttataagatttggaataaataaaaatatcatctaaataaacttgcacacatgtattcaaatatttggataagatagtattcatcatacgttgaaaagttgctggagcattagtaagaccaaaaggcataacaacccattcataatgaccataatcagtactaaaagcagtttttggaatatcttcttcttggattcttacttgataataacctgacattaaatctaatttggaataaacaacagcagattcaaacttggaaataatttcttctatatgaggtaaaggaaatctatctttaacagtgttattattcaacaatctataatcaatgcacatcctcatggttccatcttttttcttaacaaataaaacagggctattataaggactatcactaattctaataaatttttgttgtattaacttatcaacagttttggttaattcttccttttctgaataacttaaaggatattgatttctattaacttgcttattagattcaactaaaataattttatgttcgtgatttcttttaggaggaagttcatttggttctttcatagtaacaacatcattaaatttttctaaaatatcatttctgtatttattaacttcaacattattaatttctttatcaatagttttaatatcattttcttcagaggattcaacattcattgaattaatatatattagatatgaatcattatctttattattaataatagtagaaatatgtctatcatgatattcaattaaattaacattaacacttggtgttgcaaaactatctccaataaaatcatgtatatctaacttatcataatgttgtttgaaaaatggaagtcctaaaattaatttcttggtgtttgcctgcaaaactaaaaatgttcttttttctttgataggattattaaatagatcaacatcaatatctatatctagttcaccaatagcatcaacagtatcattaactaaaatagcactaattggttcaacatataatctaatcttgcttgataataacagttcatcacataaaattgtagtaatagcatctgtattggatccagtatcaataattgctgatgcggaatttttattatcaatttgtacatctatttttcgtaaattttcaatattcaaagcattaacatgtaaaatttcaggtaatgaaggaatgtttaaagttggactatttgtttcttgtttggaatcaccctttaacaatttaacttcagaggaatcacccttcttaatagtctcatctcttggaatcaccctttgagaattattaacaacagtatcaccttcttccttctcgacatttaaatgatcaacttcgggttgaatacttactggaggtgcaatataagaaaaagaactagtattattattattagatagtttattatttagtttagtaggacgagaaaaatgcatggaacgattaccaccgattggggtaaaatttgaattgtaccttttaaatggtcttttgtttctgaaaaatctttgcttattatgataaccaggtttatatttattaactctatatgggcgagaataagagcgtctaacaggagtttgatgttcgatattattgatccaaggattttttggttttgcttcttcaatatcattcaaaatagcttcagaatcttctgcataatgaatagcagcattcaaggtacgaggtttttgttgggataccatctttttcaattcaggtgttaaaccaagtaaatatcttgaaatttgaaatttagtagattcttcaaaatccaattcttgaatatattctttaaattgatcagaatatgtagagactttcattcctggaaccattttaaaagttagaatcttgtaatccatagcatgcatatcatcttcaataacaggacaaaattcttttttgaaatcacgtaaaaatctttcccaggaaatctttaaatactttggattcttctctaatttatgttctacccatttgtatgctctaccttcgagattaacaatagcttttctagcccagcttgattttgaaatacctttatcaattaaattaacgtgcaacttagataaccaagtttttgctttaagttgagcttcagtagtggagaattccttgcctttatcatcagtagaagaaccatcaaattttggaaagttagaactaagtttatcatttttagaagttttattatcatcatcagtatcagtatcggaatcagaaatatcagaatcagaattggagttatcagaatgggaattatctgaggaaaaagcatcatcaaatgaataatcagacatttcaggatcggaatggataattctaagaggtggtttaatatgtttcttctttttaataacgttctttgaatgtttggtagaatgtttctttgataattctttcttcttcttcttttcagttaattttatttccttaatttgttgctttaaagcattaatcttatctttagcagatgacatttttagttgatttaatttaattaatagatgaatataatttgatttaattaggaacacaaacactagccggtgctaccaaatgtaaactaaaatatgtaagatagtggataatacttaattacgtaatggaagtaataagtataaaataagtttactcgttggaccttttatttgtgtaatagacagcgagtagcaatgagacggttggtattaattagtagattgttctctaactaatactctgattaatgtcccctctcagaagagagttatacaaagttatacaggatatcatacttatttatattacaatattaaccattccttaatatagttaattaaactattccttatcaatcataccactccttatcataattaattcaatttcaatctaagtcattcctttcttactccgacatctccgaacctccgtatctcggaattcctatttccatcttatcatctttacgtaatcagcttacctaatcttcacgtggatattattgaacaacttgtatttattcccttacaattttacaaaggttcatggtcatttttgacgttaattagtgatttttaatattttttcttttaatttcttttaagcgttactggtggtgtatgtggtttttcaacttaaaattgaagtctgtctctgttttttacaaagggcttttcaataagttataatatactttttaaaaaaatatttttatttcaagtcattttgttattaaaaatcttacattggtagtctttcagttaattttgaaaatctaccagcactatctggagtttgacgtcagtaaaattggcttatttggtttttcaactcaaaatggttcaatttattatagtcttttaagaatacccaaaatgttatacaaatttgattagttatacatcggatgagagtaaataatctgtttaaaaaataaatatacataaacaacgaaattgttattggtttctatataaaataatttgaaaaatatccctagttatattaatattgatagtaatattataattcaagattttttctcattaactttccttttcttaataattttaggtggtggtgtctgtagtttaaaattcttatttgcagtcttagttacaacttgactaattatattattcttaccagggtatccttgtcttatcatatttggatcaacattatacctttcatcaataccatgtgtttcattcatatgttgcggatcttgtgaaatcatttgaacatgtactggtaatgatgatggcacttttccaggatatggagaatattgctgatacctttgttgatcaatctgttgttgctgttgttgctgttgttgttgctgctttgatgattgtaaatttctgccattattaatattaccgttaatattaactaaactattaatatttgattttagtttttcataaatcggatagttaattttattaaataattccagtgattctgaaaatgaattggaattcgaattcatataaaaattcagtaatggtttagataatgtcattacatcactaacttgtaataatcttaataaatcttcagtaataccaaatcttgttaatcttgaaatacatctgaaatgagatttaatttggaaactatttggacttattttgttctcataggaaaaatcatttaaaaatttttctaaacttgtaaattcaatacctgttacattataatctgttataatttcaaatttttcaaattttaatgatttatccatgaacactttcaatgaaccaaaatgattacaatatgaaccatcttcaaagacacactttttagagaaatggtcagtttcaacaattgttgaaaaatcaggtaaaacattagctgataaaaatttttgtgtaaattcaaacatttgaacattttctaaatatttcaaataaatcaggggaattaaacagtatgatattttatatgatttaatctcatttgataatttaaatgaaaaacttatatgagatccttcagtgaagaaatctgcaaccaattgttttaaatatggtaaatttggtttttcgtgtttacatgttaataaatcactatatcttaaaaatctaacaattgcaatatttgacaaacttcttctaacttcttcactcatcggagcattattaacagttgaatatccatttgaggatgttttggaattttgatatgaggaattattattattattattatgattattattattatcattatgattattattattattattattattattactaatatcattatttttttcaaatggtgaattattttggttggtgtgtttataaggattttgtgtattgacagatgttggctgtgtattattatttaaattaaaatttaattgtgttggcgttggatttaatgaatcataaggtgtagttacttgtgatgaatgactagaaaagactgtaggttgttgttgtttgagctgagatctattagtagattgatgtggacgtggaggtggttgttgatgtggaggaggtttattttgttgttgttgttgaagtggttgctgtgatagttgctgaggtgattgttgagatggttgtgcatattgtattggttgctgaaaattttgctgttgttgtacagtttgagatagttgaggttgagagtgaggttgctgttgctgttgctgttgctgttgcgactgagattgagattgggattgtgcctgaggttgaggacgaccttgttgatactgatgattataattatcgtttcgataatttttattgttagatgataaatctaattctaaatcattagatggagtaatctcaacatttgataatgaatgtccaggagatatagagatagataactttctctttttcaaatttgaatcaggaatatcaggttgtttatgtagactatgaggattaataatcttattatttatatttagagtactatcaacaggaacaggcgttttgctaacgtcatttgaaacaacaagaggacgattgtctattactacattatgttgaacatcgttcattggacgattctcatgaagaggatgttgtggtaagtattgttgctgttgttgatggtgatatggttgatggtgttgttgtagtttttgttgtgcttgtagacgttgttgctgctgttggtgtaattgctgctggtgtaattgctgttgatgatactgctgctgagatgaatgtggttgctgaagatgttgttgttgggattgaatacgttgattttgttgagattgagatatatgttgttgttgttgattataatgttgctgttgttgatgttcggattgttgttgttggtgagcttgaagttgaagttgtaattgcatttgcatttgttgttgattttgataactagattgattagatttccattgaccattatcatgattataattattatgattcataacatctaaattattatcatcagggttaaaataaatatcttgcaaattagtttgaatatttgaacctcccttaatatctcttgaagtatccaagggatctaatgatagactagcattagcaggaatgtttgtatgattatttaaaactctttgtcttgaagaaatattattattattattattattattatctacagtggaattaatgttaacatttccattggtatgctgatgagaaggtgccgattgtttattatatgaatcctgaggataattagggacaatggggtcagtcacagctgactgcatcaacataaagttgtccattggagatagagaaaagactaagaattgaaacaatcaaaagaacaataaccaatgcaaactaataattgagataaatggtggctaattaaaaaaaatcgcactaattttgtgaaaatgcttctctcatactaatttccagtcttggccttattttagtgttatattagctaaagtttacttttattttacgtttattttacttttatcttatatctattttatactattttatacacgagagagttcttgtttcttctttgcaagaagtttacgtttcttctctaattgagctttacgttcatcttgtttgtcaattccatattgcatctttttgtataatttacgttgtttatttgacatcataatcatctttaacttcttttcatcagtttcttcactaacttcagaatgctttctcttggaattcttctttccattatcaactgctgaaaatttaacacctgcggcttccatttctaattccttttgtctcttaacttcttcatcttcatccttttcatcattatcttccttatcttcctcatcagcttcaacttcttcatcatcctcatcatcatcttcatcatcgtcattttcttccaatggtgcttctggatcatatgtaccagcatctccccatggtgataaatgtggtggtaatgtctcccctggtgcataatctgaaacatttaataattcacttttattaatacaatcaaatacccattgtggttgtatatatgttctaccttgaactttctttaaaatctttggtctatcaacaatttggtgtgtaactgaacttaaatcaatatctttagaattttcaagttcatctattgctgcttcactaattactttaccacctgcacttaaaattacaaactctaaaatatcaacaggcacttctctaccaatgaagaatgtaaatttactgaataattcagaaactttattagcatatttagatggttgttctaaaatatcaccagcattcttattgttatctttaaattcatctaattcagtattttcaacattttcaataattgcttcatcatcttcattatcatcttcatcattattttcacttccttcaactttatcagcttcaatagcttttaatatttcttcatttgaaatcttagtttccttaacttcatcttcattatcattattttcaccttctggtaatgctaatgatctttgttcatttgtttctaaaacataaactgataaaccaccaatacctttcattctattttcattaatctttggaggatacgttaattctgcatcagtatataatttgaataaaacaaaatttaataaagttgaatagaattcaaggaatgtatgcataattttaaaatcaatatcagatggtatattttgagtatatttgaatggaactaaccatcttatttcttgtcctttaatagtagcagaataataaacacctttgattgaaacaaaaactttctttaatgatctttctcttgcaacatatgctaaccattgattgattaatttatttgcttgattcgtaatttttgccccaacacctgtagttgcaggcatatttgcaaataaaaacatcatatttaatgcatcatcaatatctcttaaagcgtctaagaaacttggatatctttccttaataacacgatctaatttatattttggtctattctcttctaatctttttgcactaccaatttcacccttacctaaagcttttgttaatttttttgaaaaagttttatgttctctaaatttttgtaagattggttcatgcattaaatattgaatatctttagtataatagaatgttacaggtgcagttgatcccttatttgctttcttcttatttcttggttctcttggataaatacctttgaaaatacataatctacggaaatctgcaagtgaaacttgtaattttctaattgctttagttctggtaatgaaattctttgcattaccactttcaccctttttcttaattggacccatatttgatgcttaagattagttacagataagaaatattaggaaatactatattaaataaaattttttatcttctacaaacaagtgaaaaaaaaataaagtaacgtaaatcaagtagaataaaataaaaaaattttttttttctgaagaaattttcactatctatcatatggcgtcgatgcgtctgtttgggtgtatttatagtgtaagtgtatagtgtatatagtgtacagtgttgagccccctaaagtttatcttcttcttcttcttcgtcctctgatgaactctcaaattctacttctttcaaattacgtcttttgtacctgatattttctgataatggcgggttctcagctgccaaatgctcaaagataatatttacaactgatcttagtgcctcttttaacaccttgttatcagcagtagggaaaaattcactcatcttacaaaaatgcactgccataagtactccacgatctttcttcatttttatactgtaaattctaattactaagttcataattttttttatcttttgtttgaaagtaattattgtatcatttgctttatcaaaaaaaattatcataattctagatactttactacggaatggtttctctatttcatcatacattctattcctacacacttttgaagcttttcttaaattgagttctaattcaagaagtactaaaagagcttttgatattgatccacttgtataaaataatgataataagtaaatattcgttattaagttaggacttattctcatagcttcttcctctgctttatttgttgataaatgttgtaaatatgtaacagctcccttttcggccaatcttttggcaagtcctttataaagatgcctagataacttttttcttagcaattcatcaattgttatctcttcttttctacaaaaactagaaattacattaccaataccagtttctagaatttcttgcttccttaactcttccggcttgaagaagcataactcatcaggtaatttttcagcaaagaaattgatccactttttacaaccctcaagaagacgggcttgatcaagcattgagctcaaatataggagagataagttgtaagttgatctatacaaaaggcataatgatctcttattataaacatcagggggctcaacaggcaacgccattacgtaataattaccttattttatttttgaccttcatcaattggggaagttcgttgattaatgctaggaagttcttttgttatatacagtgttaacttccaagcatatcatcatatataaccaacataatgctaaggataagttgcaagaaatgttttctatcaactagtaaaagatttaattctagtataagaataggaggaaaaattgaatcccctgaacaacttcatgaattcttcaaatccaccacttggtcaactcaaagtcttttagagaaagaaagtattgatgttaccgatgaaatgcttgaaaaacttgttaatctttcaggctttactaaaaaatcattaatagaggataaatcattataccaaaaatcattatcagatcaacttaacttcattgcaaaattgaaaaagattgaagtaggaaatccagaaaataattctgattttattacaagattagtagatgataaacatatacctgactacacatataattcattaaacgaagaaataaaaaatttaaaaccacaattatcaaagggtgagattgaagattcttggaatccattatcattatcaaaattacacgaaggtgattattttatagttaaggagggtttacataagtcagataaatgattatattctgttatttaaaatattaaactgtacatatatatatattacagtctctttagatgaatgagactaactagtaatattcagtaaccaaatgtatgttggtttagtccgctgtaactttatttatagccaccggcgatgattctttagttcccagtaaacttcccccgcgctgtctttttaatcaaatgagactaactagtaatatgtaaaaatcgaatgtatcttagttaagtccgttgtaacttcattttcaactacccgtaaaaattttgaatccccagtatttttattaagcgcgggggaagtttactgggaactaaagaatcatcgccggtggctataaataaagttacagcggactaaaccaacatacatttggttactgaatattactagttagtctcattcatctaaagagactgtatatatatatatgtaatatatattatattgaattatagattgtatataatgagagctattgaattttactgaaaaataattttcataattaaattaaaattcttcttcatcaccttcaagatctaatttccttttacctgaattaccttctcttaaatctgccatttctctagttctagcttgagttctagttttctttgtcattttctcgatttcagcttcaacatcttcactttcagtttctgcataatctaaaactaatctacgtccaagtaaatgaacaccttgtaattggtccatagcactattagcctcctttgatgtagaaaattcaacaaaggcaaaacctctagctgatttatcaaatttctttggaactctaacagattttaatgaaccaaatgaattaaataattcaaatacatccttacgtgtagcttcgaatggtaaattcttaacaataattttaccactcttggatttcctactctttttattacttttttcatcatctttattaccaactctattagaaatcttcaattgtaatttatgcccatctaaagtataaccatctaatgctcttaatgctgcattggcttgttcttttgttttgaattccgcaaaaccaaaacccatacttaaactcttacttggatctttggtatctgccttagtttttataacggttaataggaatcccggatatgatttgaagatatcacttaatgcagtattggtagttttgaaattcaaattcttaataaagatagatgtagttggacctgattcaatatcatcatcatcactatcatcatcattactatcattactttctttcttagtatctttttcgtttaatatatcattagcagttgatttaacttccttggccttttgtgtggtttctggattgattgaatcgcttacatcagcaggttgtgtgaataaatcttttggacctttttcaagatataaaatagatttacctaatctcttaaatgataatttagtaaatgcagctcttgcagctgcagcatctctgaattcaataattgcaattgttccagcaggtggcattagtaatctctcaattataccataagttccaaataattcaccaatttcttctcttgttgtaccatattggaaattcttaattaagataattttatcatctcttactctttcactgaatcttgtaagatcaacaccttttttctcaaaatatgaacgtacatcaccaataacatgagcttctgctaatgcatgtttaactgctgaacttgaatttgttggatcaattaattcatttttactaatacccaattgtgatgcaacactctctaaaactgcatcagaattcatatacagtgaattccaactaaattcttgctttgaggcatcatatttctttttcattaaacgttgtttctttaatgacatattttttaattcaaattcatccaatttatgttcttttttgacatctgctggtaaaatatgtaataatctaccttggaaaatttgtttatctaattgaatatatgcttttactgcatcctttggattttcaaattgaatatatgcaaaacccttggatttaccagttcttgaatcaactgctacatgtacttcctttaatgtaccatatttttcaaaaatttttctgaaatcatcttcagttgaggaataaagaatattacgcaagaataatctacctgttatcactattttatcaatatgtttttcttctattgtgagttgtctttgttcttctttagcttcctcttctacattgtcttcttgttcatttacttcattttgttcttgtttttcaccttgagattcagtagctgtagattttgcgtcttctgtttcttcaccatctttagaatcaataattctctttcttttactcttaagccattgaagatcgtcaatattttcattaacgttactttcatcatcattattattatcagcatcttcatttttcttttcaagatcatctaatgacatcattttttcatcaccatctgcatccgtagttgaagagaaaggtaccataacttctccatcatcatcgtcgtcgtcattatcgtctttattatttacaccaaaatcatcatattcatcatcactggcatctcctttataagctacaacttcaggtttattaacctttgctgctgcattaccagatgaaggctttattcctaatgcttcttcaagtttatcatttgttggagcaccatcagtattgacaacttcatcattagcccaagatttggattgattagcaggcttcattgcttccacaaactcttttaattgtttattaccttcaattttagaagttagattatcttctctcttttgttttttattctttcttgaattggcagctctttccatattttgtaaacgttcctcagttctagctaaaagttcttctctttgtttccttttatccttccatgagactggcacatttggatcactaaaagattttgctaattcaacggatattttagcagtatcaataaatgaaccattgaaaaatttaactgcattctctgcatcattaatatctttaaaaccaataaatgcaaatcgtcttgattcaccactatttttcttcttcaatttaacatctgtaacattccccttggttgcaaaatgatctctcaatttcgcttcagtataataacttggtaaccctttaacaatgacacgagacatacttgttaatggactccttaaaagagattaaactgaaaaatgaaaaatttatttttttctaaaatttttttacctaaacaataataatagagaaaagcggaactgagcctaaaaaattaatttagctctctatatattataattaaagctcatcatcacttcaagcatcctatcatgatgtttatgtatttcatatttacaacaaacaacttactctgaaaaatgtcaaaactacttgtacttgaaactccgacccaggaaagtattaaagttagagcgattacttaccaaaattatgctactccattcgcattgaaaactctctatattccaattgctaataaggaatcaattgttacaccaaccgaagtattagttaaagttatgacaacttcagttaatccagttgattgtattttgaaaaattttagtaacaattattttggtccaaagtttaagattccaggtggtgattttgcaggtattgttgtcaaggcaggttcagaatcaggttataaggaaggtgataaaatttatggtgattgtttatcacttaataaaagaggttcattctcagattcaattatttttgaaccaaagaaagcttttgtttgtgaaaaaatcccagatgggatgccatttgaagaagcaggttcattagcttgtgtctcaaatacagcatttgaaagtttaagaaaatataatggtaatctctatggtaaaaatgttttagttttaggtgcaggtacgagtgttggatttttcacagttcaatttgctaaatattattttaatgctaaaaatgttgttgcaacttgttcatctaaatcttcatttaagacaactaaggcaggtgcagatttaacaattgattatacaaaatctgaagtttcaaaattagaggcattattagaattcgttaaaatccatggattttttgatataattgttgattgtgttagagatgaatcagttatcagtaatttcccaaatttgttacaaaagggtaaagatggtggtattttcacacaaattacaggttcctatactttagattataaaaacattcatttatataatatgattccaagttggagatatttatataataaatggaaatatcaactaggtttctcagattatccaattgttgcaacctggactgaaagagatgaagaatacggagctgcaattgaaaaattatggaaagaaaataaactagatattgtcattgattcatcatataatgcatacaaggattttaatgaagcatttgaaaaagttgccacctgtacagctaaaggtaaggttattcttaattggaacaaccctgagtagaagagatgtagcagctaaattagataagataagagagtatagatagcaagaatttttttataatattactcaataataggattgcccttccgttttttttcacctggtatattcttaatgtctcaacacttctttataagagaaagtgtatcataagtaaccaataagatatcgtagataatgtcattgagaggagagatactcaaccatttaggtaagaatgaattgatacagatattagagtccccttcattacttaacataattaaaataaccagagccttctgctttttgctttttatactaaattactggattttctataatgtttcaacaattgtcttgtatggaatgaagatctcaatgccttcaacaagagcattctttgaaacttattttgaatctggtttttggacaatttgtatctattttttggtatgataatatcctaattttgctatacattttacaatctttttttttgaaacattgataagatttactaactgctaaatttttgatttaggaattaaataatgttaaaataaacattgttggagatgaagttgaaaatgaaaatgcattgattatcagtaatcacagatcaatcgtggatcatatagttttcccctttttgacacgtaaaacacttaaggaaaagccaattaattcagttttttcatcagactcagaggatgatgaagctgaagttaaggccaaaaataaggctaaaatgataaaaaaggaagttaaaaaaggtagtaagatcaaatttaagttattaaataatgaagaaagtatgtttgcaaaagatttaactacaatgttaataccaaaagttcaattttttacatggtttgaaatatgggggattccaacaattaattattttaaacatatatcacaagctgatgaaaattgggaattagatggtgaaacattagtttcaatttttcatcaatttcttgattctccaaataataataatacaaaatggctaacaatgttcccagaggttaatattttcagtgaaaaagatttaaaaatgcaaaatatattaggtgaaaagcattatttaccaacatttgaaaatgttttatatccaagatttggagggttctcaaatgctgttggtggattatataaaacaaattttacaagactctatgatacaacaataatttattacaatcgtaataaatcaactggagagataattgattttaatccacctactttattaaatgttttaggattaagagattttaatattgaaacagtcattttagttcatgtttcaggtaaatttttaagtagagttccattaaagaggaataaacttgaaaaatatcttgaaaatagatggatcaaaaaggataagttaattacaaaattggaaaaaaaaatacttaaggaaaatagtgtattattaagcattaaagaagatgaggcataagtttaaatttatcgattgttttgttgactattttgttaatttttttatcaatttttgctatataaaagattaatatttataaaatttattatattatatgtgagtttcagataattctttttctaattgagttaatctttcattaatttcgtcatttgattcttcctctgattcttcatcttcactatcatcatcatcatcttcttcttcatcagaatcaggttcttctaaatcatctaaatcatctaaaataccatgacctaattcttcaaaagtttcattaattttttcaacaaattcagaatcttcttcaaatctattaccatttaattctaaagcggttatttgatttaaatttgataaaaatttagagattaattctaaagaatcagattctaattcattatattgtaatcttataatttctaattttgaaatatctgaaatttgtgataatttatcaaggaaaattttacaaccttttgatttcaataaacaatcattaatatttaattcaattaattcaggccaatttttaatattttcagctaatgcataagaaccaggtaatgtaaaagtattatcttgtaaatctaaaatttttaaattttttaatgaacttaaaccaaaattaattaattttgcaataccaattggtctaataccattttgataaagtttaatttcttctaatgatttatttgccttaaaaccaattgataaagcttcacatgaaccattttctaatctatttctaccacaccaaaaagcttttaaaggttttgaattttctgaatcattttctcttaattttgcacttttatataaagctttaccaactctagcaccagagaacggacctaaaccattatttgacataataaaatattcaatagttttagatttagagataaaatcttctaaaacatcaatagcatcttgaccaaatgcattatcagataaattaagtacagataaatttggtaattgtaataaaattgggaaaaattcacctaaagattttggaatttcaaatctatcccttgaagtataaatatcttgtaaattaacatctcttaaagtatctttaaattttaaaaaagtttgtgctaataatttagaacattcaggtgatatagtattacctgaaatatcaattttagcaatattttctaattttgataattcttctatataaggtttaatgtcatcttcagtatcgaatttaatacctttatttttaatagaaaaagagtgttcttctgagatacctaggtcacgattatgaatagtagtcattctaaataagcttgtgcaataagatcaaataatgatcgaaggttgaaactgaaataataacatgcactctatttcatgttgaaaatttcataattttttttctttcgtcttctacagagtgagcgaggtgaagaggtggaagtggaagtgaagtggctgttttggtatattgttgcgttgtagagtataccacagattgattacaactgagattttacagtaaattatgattgaggtacaatagattattacatcattttaatgattgaaattatcatattaaaaagttattcttagaaactgagggattacaaaagaaatgagaaatgaaacgtttatttcaagtctctaacggaaacaatacatcaagaggaatacaaccgtggagaatactatcaaccttcataatataccctacgtattaagtccaatgacatacgcccaaacaaatacactaataaaaggctttgattgtgttatctcagtggagaacaaatttttcaatgatcaaaaagggggctcaacatgaatttttacctaagatgtcacggcatcacgttgtgtctttgcagattacaattattataaattgatagtattgtgcccagatatatttcgttagctgaatttatattgctatctatttgacagagtgaaatgtcacaaatacaacaattatatgatgcaaatggaaatccagtagatatgtccatgttttatactcaaccaccaaatcaaggtcaattaccaacttatacagaaactaaaagtcaaaccgttcaacaagttcaaactcaacaagtgagtggacaaccaattcaacaagctcaacaaaaatcttatcaacctgctcaacagacatatcaacaagtgccagaacaacaagtgcctgttcaacaagtgcctgttcaacaagtgcctgttcaacaagtacctgttcaacaagtgccaatacaaacagtgtatcaacaagttccagtacaaacagtttatcaacaaccagttcaatatgtacctgttgaaacaagaaagagtccaagatatgatgatagatatgatgatagatatgatccaagatatgatccaagatatgatccaagatatgatccaagatatgatccaagatatgatccaagatatactaccaataatagtcgtaatactactacaagtagtgcatatggcagtacaccaagtgttggtaaaacaatgttaggagttgcaggaggtgtattagctgccaatgctgtatcaaatttagttggaggaggtagaaggaaacaaacagttgttgttactccaggtagaagtaggaatattagaattagtcgtaaataattattattattattgtatttttatataaaaagtttaagatatatttgtatagaaatcagaaattatttctttttaaataaaggaccaccaatatctttacctcttaattttatacctaaagctctttccattttagctaaaatttgttgatttggagtacctctaccagcttcataatcattaacaattgttggtttttcattaattttagttgctaaatctttttgagaaaaacctttatcttgtctacccttttgaattgccttaccaacacttgcttcaattttttttggtacaactatatcatcagcacgatcaattttagttaatctttgaccttcaggatctgattttgaattacccataccatattttttatcaattgaaacaattgcaccagttcttctagctgcattaatttgacttgatgatttaataacatgttcacgtggacctgtaccaccaacttttgcctttctaccaactatagtaacgttatcccaatctgacatcttttttattgtaaaaggaataaaagaattaaaaaagaataaaacattaaaaatataattaaagccaacgttaacttccattcacaaaatcgactataaacttgtcatgaacacacctccaaaaattctttaattatgtaatgcttaagttactctcagtggcaaaaagggatattccttctagaatatactgtgggaaaatataaaatgattacataataataaattttagcacccaggtcacgtgattagtattacataatcaatacctacttattacataatcactaattattacgtaataataaaataataaaataatctccctatttaacattgtatcaatatgaaaaaaatctcgccactgttaaaaaaaaaaaaaaaaataacaccaccaaaataaaataacatcattctctgataagaaaatatttttttactccgagtattaacatgtcaatcttaagtggactggttattattatacaaattaatgttttcatgtcatgttaatttattaatttattcatctgatcataccatttttactgtccttttatgtctcatcatcatctatcttctttcatcgtctcatcaatttatatttccccacttaaatcactactatataaatgtactcataccccccatgtgattaaaatgataattctctgttctattttttaactttattctttcaacatccaaacaagacaaagatccaatcttatcttatcttatctaatctctaatacaacaaacaaacaaatctattattaacaatgtctatttctccagttaaattcatcgcaggtgtcgctttagttgcagttccattaagtttaactacattatattgtagaccatcatttgcaaatgcaattaataatcatttaattcaagaagaaatggaagcaagaagacaacataattataaaactgatttttataataaagatcaagctcatgatgatatgttagcaaattatgctcaaaaaggtgctggtaaagcaagagattttactccagctgctggctattaatcaattaattaattaatagcaacttttaaaaattcaaattattattaatgctttcctaacgactttattatattcaattctcttattattatatcattaaaatttattcatttatttatgtcatagttttttttataatataatatatattcccctttaaatcaattcatttatcatttatttatctaattctcttaaattgtaattaactatctcgatttttattattgttacaaaatttttatacatctaattatcttaaagtatattctatccaagtaaatttggtccattatagacattattgttattattattattattattattatatccttgttgaaattgaaattgatttggatttggactgaagttctgtatttgacctgtaaattgatttggggcttgcccagtaaattgattttggaattgaccttgattttgacctgtgaattgattttgattttgtgcttgattttgacctgtgaattgattttgattttgtgcttgttgaaccattcctgtaacttgttgactaaatggattatttgcaattgttgtattagttactccttgatttaaattgtttttagcttgttgttgtaatgattctttatacatttgttgttgtgtttcaggaaatacaggtattgttggtaatctctctaatccaccagctgttacctgtggtctaatctcatttactgtacttaatgtactattactattgatattattattattaacaccagtttctaatctaaatggatttgtacctgtatatgtaggtttaataaaactatttctattaacatttgattcttgatctttttgattagtgaatgcagttgttgttgatgttgtactaaatctactattactaaatggattattacttgatgtaactgatgctgatctaattggtgaattatttatattactgttattaacattattattaacattaccaaatccatttcctgtaaaattattggataaaactcttggttgtaacaaaggattagaaataaatgaattattattttcagttggagtttgtaaatttaatggaattgttgatcccatattatttatcatttgtgaagtaaattgtggttgtggttgatgttgtacttgtacttgtgcttgtggtaatggtacttgtacattattttgaattggttgaactgaaaatgtattcatattagtaaatggattaaatccggtagtttgctgaacaatacctgttgcattatttgtaattgcattagcagttgcttgtgcttgtaatgcttgtgcttgtaattcttgtgcttgtaatgcttgtgcttgtaatgcttgtgcttgtagtgcttgttgttgaatagcttgttgttgaatagcttgttgttgtaatgcttgctgttgctgttgctgctgttgctgtaatgcttgctgttctaactgttgttgttcaaaaacaggttgttttaaagcaggttcttgaccagtttttgaaacattatcaaattttttaataggtgaattactcttaccaatttctttttcagctaaatattgtcttctatttatttcaaaatctggatcttgtaagtaatccttcaatgattcagttaaacttgtttgtgcatgtttaatagttggaactctcaatttagttaatgattctaaatgttttgcaattcttaaaaattcaataacttttttagtttctttagtaaaatgttcataaattgtaaatgctctctctgcatcaattttacttaaatcaaagaaatgttctaaaatatttaaaataccttcatttaaacattgataaagtgttattaaatcagttgtcaacattctaaaacttaaaataactaaatcattattaacttcactttccctaaatttacatcttaataatgcatcaatttgattttgaattgattcagttatacgtaataaacctttatcaattgttaaatctcttaataaagttgatttttcatttgagttccaagaaccataaggtttctttgattccttaataaaatcatgatttgtctttaaaaattcttttgatcttgttagtaaataattatcataagtataaatttgatttaaatcaccaccatttgaaataaatttacctccattaccaattttaacatttaaaatatttagatgatttgataaatatgttaaacaaacattaccatcaccctccctaatcattatatgaattaaaattaatgatttgtaaacaattgtccaagcagaatcttgtaatcttttattcaaagctctcataacagttctaaatgattcacttctttcaccttcagatgttgtcattagaattggttcaacatatttaggctttggtggagctaatttaatctttgttgcaccatcaaccagtttctcaaatgtagtcattatattattatattattatattattatattattatattatcaacgttatattttttatttacaaaatcaatcgattgttcacctcaattgactctacgcaaattattgttgttcaatagtacaaattctacaatagaatctccaactaaaagccttcttcccaatggcctccttcctccctctcagtggtttctctttaaattgtttgttttgaaatttccatctccactataatccgcgctttcacttattaagaccgccccagcgacgcttaccagaggctcgttgttttatattattcattcaccagtatggtttctgtttccatgtatcacaaccagtatcagtatcagtatcagtatcagtatcagtatcagtatcagtatccatctgtgacaatacattactgtcctgcgatagggattgcaaagagtcttgtgaatcttgtgaatatgttaaatgattctgcttttgcgctgacatcagaaatgccacagttttctggtgagcttcagtgtgtatttttgttctctgtgtacgtttcccatatacacattcttcttcaacttcatctattcctcttttacctaacattgtgttatcttgcagattactataccaacagaaggaactgataattaacgtgatgtaaatatttttaaactatcactgaagaacaccatagtaaaaataaaaattaaatttcacgcgtctctatttcggagtacggaaccataaattgaagttaatcgattaatgagtgatttttaatgtaatctggatgattctgataaacaatgcagcatttatacaatccacatcgatcaactgcctatgttttaacagttacactcatattaggtgcacttcaattagcttggtcagtggaattctcagaagttacaccctttcttttatctcttggattatcaaagagaatcctatccctagtttggttagctggcccattatcaggttcaattggtcaaccaattgttggtttattaagtgatagatgtatgttatcatatggtagaaggagaattttcattataatcggttgtttattaacttgtctttcattaatatttttatctcattcaaagaattttattagttggattttgacaccttttaatttatcaaatgaatcattgaatacttttattattgtatttgcatgtattggtatctatattttagatttctcaattgcaattatacaagcttcttcaagagctttaattgttgatgtagttccaactgatcaacaacaagttgcaaatgcttgggctgctagaatgattggaatttttaatttattcggattttggttaggaactttaaatttgattcaaattttcccatttttaggggattcacagtttaaagtacttacaatcattgttgcttttttaatgatacttctgacttcattttcaatctatttaattaaagaaaggaatccacagacggatgttacattaatcaatcaacgtgaaactaataataataaattaaactctttgggaatcaaaagttctttaaatgattcagtacttaatcaactaataaactttttcaaggaaatctttatatcattcaaaactatacctaatcaggtaaaaatagtatgttacgctcaattatttgcatggattggatattttccattattattttatacaacttcatatgttggagaattgtttctctataacaaaggataccctaatccgaatctgataccacctgaactaaaggatgaacttttgaatgaatcaacaagagttggaacttatgcattattatctaactcaattgtctccttaattattgtatcatttttaccaattatactgaagaaatacttaaattatgatcattcaagtatgttccattcaaaatccatctttaagctaaatttacgttctctttggatttattcacatgttgttttcacattatgtacattatccacgtttttcattcatacatatcaagctgcaattatagtatttgcatttactggtataccatggggatgtgcagtttggattccattttctttaattagtgaagaaataagtagaattaaagatataaaagcaatacagatttactataatcaacaaattcagaatgatccaatcattgaagatgatgctcctttgatgacagaggaaaattcaatttattgcaaacaatctttgatagattattataataacatagagtacgattcaggtatattattggcattacataatgtatttgtgtctgctccacaaatgatctcttctttcatgtcttcaattcttttcactattttccataacaaagacagcaataattacgatacctcactagaatgggttttcagatttggtggcttactaacaattggtgcttggtatatcagtaggaaagtgaaaaccaatgaagaattatttgatgatgataaacttagggcgatatcaagtgatttttaaataaataattaaatatctaaagttaaataattaaaaaattaatattaaatcaaactaataaagaaaataaaatagcaataaatgataaactagttgatttctgagcaacagcaccaacgtttctagtcgaagttgtacttgaagctgtttgagcaggtgcagaatatgatgctgtttctgagaaacttaaagtttcatgatcaaagaaactaaaagttgaatgacctttaccataatggtcatcatattctggataaacggtatcaccaatatcattttcaataacttcaatatcttcatcatttgcttctgcagcatatgctaaaccaatcttattttgatgtaaattgacaacagtgtaaaagttttgtaagaattgtgaacccattgtaataaattcgttatcagtttgttcaacattgaaataacaaacaccggtacctctattatcttcattaacaatttcttggaaaaatgaagttgctggaacatcaaattctgcaccttggaaagcaattaaaaagttaccttcttgaatttcagaacagtcaatatagtaataatcttcttcactatattcaagatttaaactttgactaattgcatcaacaaaatctttagggaaaacgtggtaatctaaagcagaatttaaaacaacaggataataaccaccaccaataacatttgtattatctccgttcatataagaaagatgattcatggaaattgcaatattggttaaagtaccgacatcatcaccattaatcaattgagttgggacaatgtaaagttcatataatggaccattaattttctttttatcaattgcaccaaataaaattttaggtgcatcaggattcaaataaagtgaataagcaggttgtaaaatcttaccatcatcaactaattgttgtaagaatgttgtatattcataatcactggtaacattttcagctgcttccataattggataacctaaacctaaatgtccataagttgagtttgtaaggttactaactgcaaagttaacagttggaagatcagaaccagcaattgaaatactgtcttgaccatagtaaccatctgcaattacatcatcaccatattcacctttaaattcggtaccatttttatggaatgtatcactatttgaaggattaaatgaataatattctgaacagtcaatttgatcatcggagctaatttcagtcgtgttacttgaagagttttgacaatatggattatcattcgatgggaaccaaagatcagatgaacctgtatcaactataaccgaaacattttgagaatctgaaccaacacttagatcaatcaaaaaactgttgtcactatctgttaaatttgcataaatataattattttgatcatcatcacgttttaaaatagcagctgcattaacattaagtgataatgctaaaaagcaatttaataaaatatttaaagaaagcatagcaagcacttttaccacaaaatccacatcttttgttttcctacattcaaagcaaggatatcattaacttataaatagaatcatggaaacattacgaagaatagtcactggaaacaagattcaccattcatgttctttgataggtgaatagccaaattgggaaaaattaaaagttgcgttacggtttcaaggatgttaatatggtatcacctgttgtcaataattgatttcttttctattgttttgaccaaccccatttacgaatttgtttttttattggtctatatggtatatttggagttatcggaatgttttcaatgcttcttgggttgtaaccagtgtttaaaattataaaatttacacttaaaaagtgaattgtaaaaaattgaggtttgatatcatcaaatttcaaaaagaattttctcttataaggtaatatgatatgacggagttagcaaagttatgaaaatgatataaaacttaatttatagtgtaatttttattaattgtaggaacagtatatacaatacacagcagtaaatatttcatatctttgcttcagattttggtctttgttcggcagctttctttcctccggattttaacttatcatcagttaagtttaccttaccaattatttttttcttttcatcttttggaactttagcatattcggaatatgtacatggaattttgaaaagataacagagctctttataaattctaataattgattcatcagggtcaaatcttttggtcttattatggttaatttcatttgatgataaaagtctgacattatcttcatcattcaaacatcgagttctatcaactgtaattttctcccaaagttttttatgataaactttatgatctatctgttgtttaatttcttcaattgacgaaactctataccattctctgatgatggtaattgttctagcacgtaactttaaatcaccacaataagcgtataaactgatatatgcacgtactaaatatgaatctaatttgatatgcatattatgttgtgcattaaaaaatacggtttctgcacgattgactatatctttaaaagggattaaatttctatcattatcagttggtgttgaaggaatcgataataatcttatcaattcagtatatgttcttatatcaggttttaacctgttcttaccatctcttaaatgttttaaagaatcatataaactcaaaccaagatcaatacgtttcccttttctgaaaacttttaataaagaatttacatgaatgattgaaacttcactgttataatcactatgatctttttgaaatgatctatataattgttcaattcttgcatttgaaacatctgcagagccacccctcttagaaatagcatcagcatatccagaaatcaaaatattgtaaaatctaccctttagtttataccctgcttttttcaaattcatgaaaatatcaaaagcatcattaatttgtcctttctttaataaatattcaataattgtaccataagcaaataaaccttgaaatctagctaactttgcaagttgttttgctcttaaaagatcatctctttctaaaaacttttgcacatcattatcaacaagtaaagaatcctgtatttgtctcccagaggtccctaaaactttatattgtaaacgtaaatttggttgtttaaaaatagttaataattctttagctgtaaatggggttcttgaattgatactttcattttcaggtagctctcttccaagtaattctgataataacttctgtgctgatgcatctacaactggtgtattgttgaaatctttctgttttttcaatttctttgattctagtttctcaaaatcgacaattaaacgatcactttgcacagatttaaaaaccttagttttagttcgtactccattagtgacaaatgaagtactaaaccttcgtatgttgtatagtgtttgcattattcataaagaaaaattaatagtagattttatgaaaaatttcagtcaaattttttttatcaagttccataatatataattttagaatctcagttcctgttctaggattctattcatctttggcaatgtttatctttcttggtgtatcaactttaatgtcgagacaaaatgaaattgacgccggttatcattgaacgtgctgtttacaaactatcccatgatgatactgaaggcttggatgaaataatagaatcccttttttattatgaaaattccatttatatcttacatccacaaataccaacattcttccaggcgcaaaataaatcactgaatatttatgatagacaattgctatatgtattgaatgaaatggaaatagaaaaacccgaagatttaacagaagattatgttttatattactatgataaactaattgacgaactcactaatactgaagaatgtacagtcgaattataccataaggtgtacgaaaaattagaacgtcgtaatttacttctatggatcataactaataacatacaactcattcaactggatattgttggattgatatattctgtgaataatgaactgctcgagtttcattcaaaatataaattgagacatttgttgaaaatggtttgctataagtggatagatgtttcaatgatttatcaatggaatcatatttcacaaaagtgtgattcaataattaatgaatatgaggatactagtttgataagtaaggaggaaatggaagcttattatcaattacaatggttgttaatgtttgcaatgtttttgagcggtgattatgaggatgtggttaaacaatttgacaatttaaaaactcatataattgaatcatttgatccaattgttgaaagtattattgatgtaattggactatttagagtcatcacactgtgtattattttgacacaaaagaatagtcaaagatccaaatactggagctctaagatgttttatgaagttttctttgatgatcctgaacttcgaaaattacaagaagattatgaaaataatgatcatacaaatttagatatattgttgaaggattttaaatggtgcctgctattgaatgaaacttttgacagagtatcggagctattattacagaaaaaaatcatgcagtatttatctgttattcaagaaattgaagtgggagaactttgtgagtttcttcaattaccttatgaatttttgtttgaaaaaattatgaatatgattactgtattgaatttacccttagcaatagagcaagatactattgtatatgttcctaaggttactatccatgatgatgtagcaaacattcatcataatattcaacgtgaaatacttcgacttaaagcaattcaagtgaacaaattgataaataattaaatgattctataaacatgtttcaatactttgtattgattataaactataaatatcagtgacctcttcttcaattttagtggtaacaccatttgaagcaatattttctatatctacaatttcctttgcagcttctgatgttaaaactacgttaatatcatcaccaacggcaacatcatcctctattcttatacccattccttgatactcttttggccatctatcatctttcggaacataaacaccaggttcaacagttacaacttgacccttttgtaattttactgaacgtgaatataatggacaatcgtgaacatctaatccgagattatggccaatataatgaggataaagatattttgaagtttcccaggattgtaaatttgcaaaacctgcatttcttaattctaatgttaataaatccacgcttaaattatgtaaatcattaagactattaccttttttaacagtacattctctaataattcttctttgaacattaagaagtgattcatacaattcagcttgtgcaggtgaaaatttaccattaacaggccaagttcttgatatatctgaacaataaccacctaaattaccagcagcatcaactaaaactaattcaccatcctttaatagatcatcattacgaacataatgaatacaaagtgcatgatcaccacctgcaacaactggaacataagcagatttatcacacccaccattaataaatttatattctaaaaatgaatgtaaacctttttcagatttgaatcttttagcatatgcttgattatatgctctaccagaaattttacctgctaatctcatgattttcaattctgaatttgatttaataactctaagatctgaaattaatgaattaagtggacttaacttgaaaccttgctttgcgtgagattttaacatttcttcaatattaacacgatcacgagattgtgaaccatttattgaatttgacggtaacattctttgaaataaattatgagattttgaatttgctgaaccaccagttgtgtcataataaacatttgtgtatttttttagtaatttttctaaatgtgaactaaatttttcaattggaactgaaacatctgcattgaaaatattttgagcaccttcaacaccagttctttcaccttcccattgttcaacggctggatccgaatctggtacacataaatgaaagatatggttatcagaatctgatgttggcttttcaataagcgcaattgaatctggttcattccagcctgtaagataaagaaaatctgtattttgctgaaatggatagaaaactgaacctgaagcaaatttaattgtgttaccaggtattatagctaatgactcagctggtaatgagttagctaaatttaatctacgtttataatattctagggcagatattcctggtgttaaatcaccagcttttatcagatgaggtctagtctcatagatgggttgaccagcacgaaatgttgaagctaatcttttgaacatttgctattgataaatgtaatatacaatcaaagtggagttccaaaaggttgaaatgttaacaaattataagtttttctttactaattgaggattttcagatttctcggaattttcaagtttttcggaatttttagatgattcagctataagtgactttattagggcacgctcattgaataatgcacataacaacagtaatacagcactgatacctgaaatgataagctgttttaatgtggtgacatctccattaaagtacttgtattgaaatattgcaacagttaaggaaataagtgtgaatataatgtatcttttttcaaataatggtattttaatagttaaattaaaatgacaaaataaaatccgtgtaaacatatttaatatattagctataattaaaccataaatatgtaaatctaaatatgagattgtaatgtaaattgtagaaatgtaaaaaattgaatttaaaacaataaaacgtgaacgatgattaattgtttcctttgaagtatttaaagattgatataatgcctctgatataccattgattgccaaaaatggaatatacaaccaataaagtttaaaagcaggtatagatgtggtaaatttgggaaagaaggtattgacaaataatgaagtatttaatggtgcataaatagtaatgaatattgataaatagaaataaaacgatataataacaggtagatgtgcaatacttgaagtggaaactttagtatattcttctattggactgaaaataattcttgcaattaaagcaccataattagttaaaaacgaataagaaccttgactttgtaaatctaatatacgagcgattataatatgatcagctcttgaaagaatgtttttgaatagtaattgaacaaatatggagatatatgtatcatcaagaaattgaatttttggaactggtaacgaaggtggatgaatgtaagtgtaggaaataaagaaacaaaatgagaaaacgattcttgcaattaaagcagcatagaaataatcataatgtaagaattttattaaacaaatatgaactaatgatttaaaaatagttgaataagtatcaataaaagctttaatatctaaacgacgactaattgaccaattatagagaaatgcatgttccgcagctaattcaagacaacctgcaataaatggttgaaatggtgaatctaatgggtatatgaaaactgctgatgttaaagcaaaaaaaataattgaataataagcgtaaattgaagagttattctttgaagataaactagcaactcttgaagtatctctagctaataataaagcagtatctaaagctgaatcatgaactgaagcgaaacctacttgaaacggagaagtattagaaactaaccattgaccagcaacaaatgacgatccacgagcaaccagtggtaatataaaagaggcactcatgtgtgtttatttgttaaatagagtattattatatatatatttatatctagtaatcaaattgaaaagaaatcaattggcaaaaggtatatataacagtaattgacaattaaagtttccgcattgggataattattaataccgtggtttattttaattttcaaggcctccaccactatcaacacttttattccaaggtttaacttttttttccttctatttacaacaaatggatcgtgaactaagggaacaggatagatggctacccattgcaaatgtagcacgtattatgaaagctacattaccaccatccgctaaagttagtaaagatgcaaaggaatgtatgcaagaatgtgttagtgaatttattgcatttgttacatcagaggcatgtgagagatgtttactagaaaagcggaaaactgttaatggagaggatatactttgttcattacatgcattaggatttgaaaattatgctgaagtacttaaaatttatttagcaaaatatagacaacgaagagcaagtagtagtaataatggcacaacattagcaacaccatatattgcacaactttatgaacaaagttatccaacaccacaacatgggaatcccgattataaggatgaagccccgtccgaacttaatactatagatattgttgatacaaatgtcgaagagacgacagagaatccattacatgaggaagcagtggggttacctgatggtcttatatagaagatgtgtttgtgtttgtgtttgtgtgtgtgtgtatattattatttactatttactatttactattaattattattcttttaatacattataatataacagttatatagcatttgactgatatttatatactctagtgatgtaatggattatcttatatgaggggggtaagtattaaaaatagcgaaaatttcttttttttttctttattacatgtagtcttctactatcatatcatgacattgagatcaatttttacttttaattttaatttgattttttaactttgtttttgatcacattttaatcttttattaaagtaaatcttttgtataaggatgagaatttggagtattatacccttactgttaagtacagttaccgctattgatttaaatattacctcaccagattctatttattcagcagctgcattaatagcagatggtgttatggattattattggggtaaagatccaggtggtacaattggtatgtttacacatccctattattggtgggaagcaggtggtgcacttggttcaatgattgattattgttattattttgataatgatacttataccaatacaattattgaagcaattttatatcaaacaggtgaatataataattttatgccattaaatcaaacaacaactgaaggtaatgatgatcaagttttttgggggattgcagcaattcaagcagctgaaagaaattttacaaatccaccttcaaatgcggcaagttggttagatttagctgctgcaacttttaatacaatgaaaaatagatgggatgaagaatcctgtggtggtggtttaagatggcaaatttttcaatggaataatggttatgattataaaaatactgtttcaaatgctggattatttcatttaggtgctagattattaagatatacaggtaatgattcttattatcttgattgggttgatagaacttatgattggttacttgatgttaaatttcttgatgaaaatacatggagagcatatgatggtgcacaagttgttggagattgtactaatatgacatattatttatggtcatataatttagcattagttgtttcaggtagtgcatatatgtataattatacaggtgaagaaaaatggtataatcgtacaatgggatttgtttcaggtgcaaatgtatttttcgatgaatatggtgttatgtatgaaagtgcatgtatgagacatcatacatgtcaaactgatcaaagatcatttagagcatatttatcaagatttttagcattaacagcagttttagtacctgattcaagggatacaattaatacatattttgatacaactgctaaggcagttgcacaatcatgtgttggaggttatgatggtcatacatgtggtatgaattggtcatatagtggatgggatacttattatggattaggtgaagaaatgagtgcacttgaagttattcaaagtttaatgattaattttggtaaggatacaattttaaatatgacagatggtggttcaagtagaggtgatgttttatcaggtaatacaacttataaacctgaagcaaaattattagatttagataaaggtgatacagctggtgcatcaattattacagttataattggtattacaattattttgttaggttattttgttatcgtttaggttatataggtattaaattctataaagtcattgttatttagtgtaaattatttttaaaaaaaatatatttttgaaaaattaaaattatttttgatttaaaacttcttcaagagcttcatcatttgcatcaaattcaatttttttatgattattttgagcttgcagtttttcttcatacattgataaaccaattgaacctaataataaaccaacagttaaaaattgagcatacattctagcagttacaaatttttgagttttagttaacagaggatctttattaacatgaacccaagacccccacattgaagcagcccataaacctgtaataattgaatattttttttcagataaaacttcaatacatttttcagttgccgataaagcttcccatctacgatgttcatttaaaattcttttttgagaagcttcagaagaatacatatcataatcaaattcatttgaacataattcagcattaactgaagcagtaaaagcaggtggtataacgaaaattgcagtacgaattgaccaaggtaaattaaatatacgtggataaaaacgaggagctgcaccataaattgctaatgaaaagactgtacctaaagctaaaccttttaaaccaccatgaagaacagatctattatgagcacgtttttcttcttctgtaatcagtttcattgtatatgttagttagttagttagttagttagttatgtttattgatagttttaaaaaagagaaatataagagaataatataataaaatgtaatatttatttaatgataaacttatattagataagatgatatatctttgtatttatagtaatttatgaaatatacgataaatttatacgatatatacgatgtagaaatagattaaaaaagagatatatggagatatttaaatacccatcagaaagatgtactaaatagaaacatgctcatttctgtcaaagggcacggaacgaaatgagtgataaccggcggcctttgagaggccagttaaaaaaattcggactttgattaggtaatacaatatttacttttctttttttaatatggtgcgatttttatctcagcttcagctctttttctttttctttttctttttctctttttctttattttaacaccgggccggagacgggacgttttttcagttttagtttcaattttcattttctaaatatatcattttatgattaatttttcatcatgataattgattgacacgatgattcattaatttagtttgatgtatttttgtattttaatttattttatcaggtttatactatattaggtatatattttagtactaaccactttatataccacaatccagaatgaagtattcaagtggtttactactatcgtttcgtcgttttaattcatctttcctatctcgttatccttcacttaaagaatcagatttaaaacctgatggaactccagattattttaaattaattttaacttcaagagtttatgatgtattagatgaaactcctgctactcatgctcctcttttatcaaataaaactaattctaatgtttatcttaaaagagaagatttattacctgttttctcatttaaattaagaggtgcttttaatatgattgcaaatttacctccaaaattacgtacaaagggagttattgcttgttctgctggtaatcatgctcaaggtgttgcttattctgctaaaaaaataggtattaatgcaacaattgttatgcctgttgcaactccttcaattaaatttcaaaatgtttcaagaatgggggctagagtcgttttatatggtgatgattttgatgctgctaaggaagaatgtaaaagaatggaaattgaacatggttatactaatatacctccatttgatcatccattggttattgctggtcaaggtacaattgctttagaattattacgtcaaattaaatcaaataaattatctgccgttttcgttgcaattggtggtggtggtatcattgcaggtatcggttcatatattaaaagattagctcctcatgttaaagttattggtgttgaaacttttgatgctgatgcaatgcgtcaatctttagtaaagggtgaaagagttgcattagataaagttggtttatttgctgatggtaccgctgttaaattagttggtgaagaaacttttagagtttgtcaagaattcggtattgatgaaattgttagagttaacactgatgaaattagtgcagctattaaagatgttttcgaagatacaagatctcttatggaaccttcaggtgcaatgacagttgctggtatgaaaagatatattgctgaaaatcctcaaattgatcattcaaagaaaacttatgtccctgtcttatcaggtgctaatatgaattttgatagattaagattcgtttctgaaagagctgttttaggtgagggtaaagaagttttcctttgtgttcaaatacctgatactcctggtactttcaaaaaattacaagaagttattcatccaagaaatgttactgaattctcttgtagagtctcaaataatgatggagaaattgttgaagtttatacttcattctcagttattgataaagaaaaagaattaaaacaagttttagctgatatagagaaagcaggtttcaaagcatacgatttaactgataatgaaatggctaaatctcatggtcgttatttagttggtggtagaaataattctcgtgaacgtttaatcaatttcgaattcccagaacgtccaggtgctttagataatttccttgatatgttaaaagcagattggaatttaacacttttccattatcgtaatcatggtgatgatattggtaaagttttaactggtattagtgtacctgaacatgaagatgatgaatttcaagctttccttgataaattaggttataaatatactgatgaaactaataatgaagttttcaaactattcttaaaataatttttatatattataatagatagatacacaatattaataagattcacactctgtatattatactattccttcttctttatataacttatcatccaaaatttggccaaaaaataaacattttttatggggtccctaatgaaaaatggtacttttcaaaatttcaaaaaaaaaaatcgtgctacatgaatttagtattgctcagacttaatgcattccatctcttttcactttatggatcaatgaaaataccattcagaatatcccctaaactgggtgataaaccattatttaaatatccaaaacatattagaacattacttaaggttggacaattttcaccaaataatggaccaagaacgatagagagtgttgtatcttatataaatagagatgtacgaaattcaaatgaaattggtaaatcaaataattcattaaatgatatacgaccgaaaaatttatcgaatatcaagataataatgtgtatttctgcaaaggattttccattaggtttacatagaagattacttgttttattaattatgcgtggtatattaactgaaaatattcattgggtaattacagattatgatttatgtattaatggactagattcacaattggtattacatagtgatatccttcctattaaacaaaatattattcaacagttgaatacgtatatgaatggatttttcgatagtatagaatcaataactgatgatgaaataaaatcaaattctgttcttgacaaactaaataaattcaaaatatcaccagataggcttcatttattttcagcatcaacggaatggactttagatgatcttatgtctaatttaggtattgatatggataatttgaaacacagttatattatcggacaaacaaatactggtaaaacgacattaactagagaaatactaaaatgtgttcaaaatgacttaatgagtaatcaatcatggcaaaactttacaaaagtttctgattttactaaaataaaaccttcaccaatcccgtttatgtcctcatttcaaacgtatcaattcccaggtatgacattaactgatacacccgggattgcacgtcataatggtggtatatggggtcatgttaatcaattcggagctagatttttacgaacattgaatccaaaagatgacgaaaaaataataaaagagttgaataataatccagatgttaagataaaggctaatgtattccccaaatcagaagaaaattatcataaaggtatctccattggtgatttaatttatcttaaaccctggacaaataatcccgataatgatctaaatgttaaaattttgaaaaatttccaaggtaaagtatcagttattgattatgctgaaattaataaacgattatatgataaggaaagtgtgaaaatattcaaagatcattcaaaggagagatatcttattcatggatacaataatatggaattggtattggataatataggtactgttaaaattgactgttctaatgataatagtaatgtctactgggaagtcattatcccaaaaagagttagaatgatacaaagatttgcaaaagatggtgaaactttattcaaaacgtataaacctctctgcactaaaataaaacctgaattatatagactaagtgcagtttgattttttttaacattaatgtataaataacatatcaaagtttttgatttttttattattatccactcttcaacggtcgtattgtcatgtcatcagatcatcgattacaaagtatataagatagttaataataggaaccatcggaataagtctggtggataagacgcgacgaatagggcttttttgcggaaaatgcttagacgttaggtgtcaagtgtcaaacaaattatttttccacttgttcaatcgatcaatttttccttctggaatcaagaaaccaaggcaatgaattggatagttttggtatgtattccattgctcattctgtatgtggttgtattgatacatgtaatcttgggatttgtgcaaattatgcgatgtatttctaagaatgcacaagaaaagcttgattctaaaatagatccaacaacacttgaaggtgtaacaattttgaggccacttaaaggtattgaatcagagatgacaaaatgtttagaatcttcctttctacaaaactatccaactgataaattagaaattatcttctgcgtacagtccaaaaatgatccatgtattccaattgttgaaaacttaattagtaaatatccatatgttgattcaaaactgttaattgatgaaaatcaaaataatttagattattttgggcctaatccaaaagtaaataacctacataaaggttacaaatctgggaaatttgatattatgtggattatggactcaaacgtctacgcagatagaaacacgttacaacgttcaatatattctttgcaaaacaatttaaacaatggatctaatgttttaccatttcataataaaaaagttaagactataacccatattccaatagtaaaatgtcaatctaaacatatgattaattggggtgctagacttgatgaaatgtttatgtcaacatcacatgctaaattttatgtcgctttaaatacaatacaacctgcaccttgtatcaatggtaaatcaaatatttttagaagatctgatcttgattattcagttgctaaattaaataatatagtagttaataaaggtgaaggtttatcccattttgcaaaatatataggagaagataatatgataggtattgctctgtgggatggtgtggatggatgttcaggtatgagttgtgatatagttattcaaccaattgagggacaaaacaaggttagagattatatagatagacgtgtacgttggttaagagttagaaaatatatggttatggcagcaacattaattgaacctacaactgaaagcttagtatctgggcttattggtagtattgcaattaatgcaattttgatgaatggggagctaaagccgttatgggtgtattttttctttcatatgatgatatggtacttaattgattggatacaatatcatcggttacagagttttaacaactcttccaaagatcacaaaaaatttttcatgttatggttattgagagagattttagcgttacctgtgtggatcattgcaatgtgtgggagtgggatagaatggcgtggacaaccatttataatcctccctgatctctcagcggaagcagtggtatcggaatgaaattttcgtatagtggaacgccgagacaagaactcgatctgctgacttggtcaccgtgggcagtaaaacgtggaaattccagggaaaatcacaccgtttttttcgttttttcttcgctctgattcaaagggtctcccactgtattttggagaaatcatcaaattcttctggaatcatctcaagttaatggaatgactaagttttcactttatatataatcatgaaggactttcaattttgtttattttcaaccattagtggttttctaatatactgcttattcggtaaagttaatgtctcataggcataattggaaatcacataacgaagagtcaaaaagtgattcagaagacaatatcgatgatgatatacaaaatgatattgaggaaggatacgaaaatataacagaaactgacaatgaagacactaataaaaaatcaaaagtattaaatgaacctctaaagaaacgtcaacgttcaacattggctgaaaaaattatgatattagattatttgaaaagtcatgattattcacaacatgaagtcgttacacattttcaagataaatatgccatttctacatcaagtcttagtgtttggctacaaaaggaagcagatttacgccaaagatatgaagaagctactaaccgttcaaatgccaatgcagaaattatttctaattctaagaaaaaacctttttacaaatacaaagaaattaatgaagctatgatgtctgttgtcaatgaacgtcttgctaatcatttaccaataactgatcgtattctgcgtgagtattgggttaaatttgcagaaacgtatggcgttgatgatccgaaaagaaaaacaggttttagcagaggttggttatctattttcaaaaagaatgcaggtttacttaaaagaaacagtgatgtggctaaaaatcaaactgaaaacgaaaataatgatgaatcaataacacaacagagattgcatcgtcatcatcaatcatatccacagcatcacccattacaatcacaacaacaacagcgatcacaaccacaaatacaaccacagtcccatcaattgcaacattctcaatctgattctttttttaattcatcttctcaatacacagatttttcaaactcctcattaacacactccattgcttttccaaataccttgaatacaaacccctttgtgaatgaagaattgagtacttcttcaaaccctttttttaatcaaagcacctccttgaattacaatgataataataatttgattacacaaggtacaactccaaccaataaattttacatgctgaatgaagatgatagtacagaatcttcaaatatgccatttacaaatactcctatttcctacaataattacggatactctcgtttaaatgaaacaatagttaaatctgaaccactggataataccaatgaaacaatcaaacaagcagaagaactaataaatcaactggaatattgtatgaagaaactagctcaaacggatgcgtttcataatgcagaatcttcttttcctaatttcaaaaactcattttactgtgatagagatagattttacacaaactgattatcttatactctagcttatttgcattacccccaaaaaacttttataaatatcttagacttttcttaatctttatattctttgtattctttgtattattataatatttgcataatattcctttcaaaatttacacgacatatatctcgactaacagctaaaagagttgattatttatgtattacatagtgtacacaataaagaaaagtgaaatggcaggacatcaattaaatttgtgtttgttgagtttgcgattgggcttgtgcttgagcctgtgcttgtgcattagcttgtgcttgtgcttgatccattgcaattatattttgaccttgcaattgttgttgttctagtatttgtgattcgtattgttgtaaatttgcattatccaaagcacctgcaccttcaatttcatggaagtctaaaatttcagaatacatcattattttccaattttcaacaggtaaatcggcattattaaatgaccaatcaaatttttgttcggcaactggttcatcagttggatcatgatatggtgcaagataaggatgtgataatgcatcagctgctgtgattctctctcttggatcaaatactaacattttagaaagtaaatcaacagcatctggttcaacatttttaaatctttcagttaatggtattggatccctgtgtggtaatgattgaacaaatttcaatgtattttcagaacaaattgtatcaataacatgcgcaggtggtgatcctaataattcagtaataatggaaaattggtggacatgatctttacctgggaataatggtttaccttcaatcatttcagcaaatatacaaccaactgaccaaatatcgacttcagtatcatatttttgccatgttaacataatttcaggtgcacgatagtaacgagttgaaacataaccggtcatttgtggatcttgaactcttgctaaaccaaaatcacaaatctttaaatcacagttttcattaactaaaatatttgaaggttttaaatccctatgaatgacaccagcggaatgaacatatttaagaccacgtaaaatttgataaaggaaatattgaacaaactgtttttctaatggtctagaagttaataatctatgtaaatctgtaccttgtaaatctgtcacaaagtaaatatcttcaagaggggataaaaagatatcttcaagtgaaattaagttttcatgccttaaatgatttaataattttaattctctgtaagttctttttgctaaaattggagtagagaaaggtttcataactttcttgattgcaacattttgattagttaaggtatcctttgctgaacagactaaaccaaaggcacccattccaattgggtttaggtctgagtatcttgaagttgtttcaaaaactgtaccgaaaatattcgatctgacaaaatcttgtgacgacatgtgtgtttggttaattaaaaaggggggctatacttctacctggaaaggacaaacgtatattgtattgatagtgatgttaaaattaactaaacatcaatgattaaattaactcagtttagcagtggcctggtggcaggtgcacaaaacattcaaatttcgagggtgttgagtgacgtagttggtttggagaaatttggattttttttccattttcatgacattgacgattgcattaattgttagagcaaattaactttgataagcagagtgtgagtgtgtgggtttattataatgagtgttgaagcaagtgtattggatgagaagtatctcactgtggcagataagtttgagtttccaacatggaaatcaatgggtgtaagtgagattgatgacaaagtaaattatttatgtggtaattcacttggattaatgccaaaatccactagagagttcataaataaggaattggatgcatggtctgctcgtggtgttgaagcacattttcgtaatgaaataacaactgattgggttgatgtagatttaccattaattcctaaaatttccaaaattgttggtgcattagaatcagaagttgcagtaatgggtacattaacaatggatttaaactcacttttaataagtttttatcaacctgatatagcaagcggtcgtacaaaaatattgtttgagcgtggtgctttcccttcagattattatgcaatgtataatcttgctagattaaagggtttggatccaaaagaaacattattacaattagaaccattagagggtgaatttactttaagaactgaagaaattttaaaagttttagaagatagaggtaatgaaattgcattagtatgcttttctggtattcaatattatactggacaattatttgacattcaaaaaattactcaaaagggacatgagatgggttgtaccgttggttgggatttagcacatgccgcagggaatataaatttaaaattacatgattggaatgtagattttgctgcatggtgtagttataaatatttaaatgctggaccaggtggtattggtggtattttcgttcatgaaagactttccaaaggtgatgatattaaaggacgtccaagattagccgggtggtggggtaatgaagcaaataatagatttaaaatggaggaaaaatttagaccaatcgaaagtgcattaggttttagacaaagtaatccaagtgtcttagatgttgcatcattaaattcttcattggatgtatttgaagcttatggtggtattgaaaaattacgtgaaaaatcaattgctttaacaggatttttagagaaactgctacttaagagtgaatattatggtaggagtagtgataaaccatcatttgaaatcatcacaccaactaatccattagagaggggggctcaactatcgttacttttccatccagaaaattgtatggaaaaagttatggaatatttacattcacacggaactgtatgtgatgaaagacgtcctaatgtcataagagttgcaccaactcctctttacaatacatttgaagattgtgttaactttgtagagcttcttgataaagcgatgggtgatatttagacattggttgtatagttttatatagacttagactacaaagactccattgcatgtataatctctgaacgttatctatcaagtgacatcattgcaataccattaagtcacaaagaaataatcacattaggtaattatgatattttcaaaatcgccattgcacgtgacaaaattactgacaatggaaagtgttgataagtgccacgtccttttggggtgaaattattttcctatttaaggtatattatctacatcatgtataataagaaaacaattttttatcaaatcggtttgttactatccagatattactaatctatagcctttccttagatatatcatatagttgatctgagtctctctattatcaaccttcaattagtaatgaccattttataagaaacatgtattgtaactcattctcctttcttactcttagtaggatctgttttggtttggatattaaataatgaaaaacccattcacgagaaaagaccatctcaacataattccagaagatgaacctggtattggaaattctcatgatgaggcttctttaatcaataaaatacacagtcgttatagtaaacacagctctgcaatagaatcaatacccttatatgatcaaactatcccctcctgtgatgaatctgtaattcaacctctagattatgcaaaaaatttaattaaaaatcctgtctctagatcaaaaagttatttagtcaatttatttcctattgctagatggcttccatattatccaacaagaccaaaatggattatatccgattttatcactggtgtctctgttgctattgtcctagttcctcaagcaatgtcatatgctaaattagccggtttgcctccgcaatatggattatactcttcatttattggtttaatgatgtattcaatttttgcaacttcaaaggatgtatcaataggacctgtcgcagttatgagtttggaagtttctaaaattatagatagaattcaagataaatatcctggaatatattcagcacctgaaattggaacaactgttgctcttttatgcggtgccatcactttagcagttggtttattaagattgggatttctcgttgaattgatcccgctaccagctgtgatggcatttacaacaggttctgcatttaacattattacaagtcagttgcccggcttaatgggtttctcacaccttgtcaatactcatgaagctccttacttaattgtaattcattttttacaaaatctaaaacatactaaagttgatgctgcatttggtcttgttggtctattcatcctctacatttggaaatttactgcacaacatatgattgatagatatccacaaaaagcattaatttggacttacgttttaaatgttagaactgcaattgttatcatattttcaactttgatttcatttttaattataagacatgataaagaacattctccatttgcagttactggttttattgaatcaggtttgcataatattggtgtttttacaccaccaaatcaattagcttcaagaattgcaccagatttacctgttgcaactatagttttagttttagagcatatttcaattgccaaatcttttggtcgtgttcatgattataaaatcaatccaaatcaggaatttattgcaattggtgtcacaaatttagtaggaactttttttcatgcataccctgctactggatctttttcacgtacagctttagcttctaaatgtggtgttaaaactccatttgcttccgtttttgctggattctgtgttttaattgcaatatattgctttacttctgcattttattatattccaaaagcaacattgtgtgctattattattcatgcagttagtgatctaatggcttcctataaatcaactttgagattgtttctagttcaacctttggattgtgctatctttttgattggtgttcttattgcagttttctcctcaattgaaaatggtatttactttgcaatgtgtgcttctgctgctctaattatttggagaatgtgttggactaatggggtttttatgggacgtataaaagttgttcaattggttaatccaactataattaaagaatcagatttgaagaataagaatgagttaaacaataatttaaatgacagaagcttttccaactctggtttgctttcaatgccagattcttttatgagtgtaggtagttgtaacaagggtgcatatggagaagatgttaaaacagttaataccgatgatggaacttcaattagttatatgtatagatgggttcctatgaataagaagtctatgttcaatcttaatttcaataattcaagtaatgttcacacaagatatattaatgacaatgtttgtgttcagcctccacctccaggtatagtggtttatagaatgagtgagagttttatctatcctaacagctctgctcaagttgaacacattcttgattatgttaaaaataatttccattcctcaaaagatgctaattatgctacttggaataatatacacgagattgcaaacctcaattactctttaccgcaatggaatcctaaatcgatgaattttaaaaacctaatggctaatgtaaaaaacattggaaacaaaagcaatgaagaatttgttgaatccaacaaagacacttattcgaagaacaattcaactctggaacaaaatcaaaataaaccaaaacttaatattattcatttggatttctctcaagttgtagcaattgatgcaacatctattcaagcattgattgatatgaaaagagctattactttatttactgattctccatttgaaatccatttttcaggaattattaatccgtgggtgatacatggacttgttaatgctggctttggtggcaaagtcaactctgataatattgaaacattcaatagtgataacaacgtagatgaaaatgaaattgaaccggatattgaggaagataggtttaatgaatctgaaaataggatcatgcatgaagacttagaaatggctaatgtcaatagcaaatctcccaacgatgatactgaaaatgtcgataagtatcgatacattgatgccgctttgagtggtgataacgttttataccctttaaatggaacaaattttccccatttccatttcgatataccatcctattctgagtatgatcagttggaaagtattaactattaaaattatataaaatacatattattctatatcaaaatataattgaatcattgaatagtttatcagtttaacaagggcactttatttttcttaggacgaccacgttttcttgttaatgcttcattcatatcctcaggctttaattccacatcattgataagcacgtaagatttattttcatcagcagtagttgcctttaatccattacaaactgtcactgtatttaaacctttctcatttgatgagtcttcatcttcttcatcttcttcagtataattttcgtcatcttcacccctgaaattaaaacttggcgttgattgaatttcattaaaaggtatcgttgaattgacagggacatttcttcgtaactctagttcgtcaattcctttagctggatcaactttacgcacattcaaaatagcaccatttttacgatatttccatttttccattggtgtatttccagcacatccactgacatgtttgataaaatctttaactttagtaaaatatgtttcacaagataaacaaaagccactatctttttcctctgtatcattttcagctggatcttttgagacttcttcagtctttatttcttctccatctttattcttgattacattctttttcttttccttttgtggaaattcatatctataatgaactagttttaaatgtcttttcaggacatccaatctattaaaagatccaaactttttgtgtggacatgtagcatatttcacattccaaaatggacaatgatattgtggatttttatgagatttaaaatgacgtctcaaatcactagctctcataaatgaccatgtgcaatgtgcacatttgtactttttaggttgattagggtcatttgatgtgattttagatttagcaatgagatgtcttgtattagcttgtcttttgatgatgggtatatcattattctttactttactcttctttttcacattcatccctgtgttcacatttggattcaaacccatattcattccaatacccatattcattgccatagcagccatattagggaaatacatgttaggcatcacaaaaggttgaggcaaaactccatgtgtttgataatcagcagttggcagtgcagtaaaatatgaattactataattaggcatttcttgactcagattggcaaaagaagtattcgagttactacgtgattgaagttgagattgtgattggttttgctgtaatgggtggagttgaggttgaattggtaaattagaatcagaaaaatttgagtggctgttgttattattattctccaggtgaaattgtaaatcattcaatggaattgatgatgaaataaatggttgtgtttgtctaaatgtttctggtggttgatttgattccaaagaagggatgttctgatcatcagaaagtgaatcgtcggcataatttacgggagtagcttgttggtgttgaaactgatttatcattgatttattaaatgaatccattatagatacagataacattggatcaaggactggtgcaagttgttgtaatttttgaagttgttgaagttgctggaattgttgaaattgttgtagttgttgtaattgttggagcttttgtatttgattaagttgtgatgttgtattttgagttgaatcatcatattgagattgatttttttcgtcttttgtaacattcatattataatttgaaccaagagtttcgttgttcgtctgatctccagtttcgtcttcattttcatttttctcttgttttgagctagcatcatttggtttagatttctgtgagatattgttgctcatactatttcctgtagaattttgattagcaatagagttttgctgcatcatggataataaactattcatttgcaacatattagggtataaaaggggattttgaagttgcgaaaatggttgaaactgtggaaattgttgcagttgttggatttgctgtagctgctgcaattgttgtaattgatgtaattgttgaaactgctgtagctcttgaaattgtgtttgattttgtggagaaaaaactgtttcatttacgttagtatgaggcttagatgtaattgaatttgttccatttacgttagtattttctcttgagctgttagcattttgatgagaaatttcgtcttgtttagaaaaggtgctgttaaatattttattatccatgctcggatgttgatagtttttgaatgtaatatcattatctttgaagttatcattaacataattttgaaactgttgttgctgctgttgctgaaattgttgttgttgttgttgataaattttttgataatggttttgattgaggttttgcatgatatgctgttgaatttgatcctgagaactgtgtgatatattgtttggattgtaattttcttgtatattttgaccattattttgagtttcattctgactagaagattgcaaacttgtttgtgactgatgttggtttaaggatggagctggtgatgatattgaattctcttctaatttagcggtaaacctattttgataataactattagaactgttattatgaccattattactattattattatttaacgttgaaccttcattattccaatctgaacctgagtttaattgaccaaaattattattttgttgttgctgataattctggtttgatatcccatgtccatgagcatgttcttgagggttcattatgaattgctgtagggtggctcagtgcctatatttatattaatcttgtgatctaagaagaacctggggaagagagtaaaccggactgccgattctggttgcggctttttgaaataatttccatttttttgtgaggctttttagagtttgaaagtttttatcattgacaaatcgtcgtttactaactgcatgaactttgagagtggctgtgtgatcttggcttcttattagctctatctcaatatataactgaagtgacggatggtctttaataagacttagctttgtaataatgatacaattacagttaatctcgtcattcttacgaaaattatctacttggacattttcggtctgatttttcacatttctctacttgttttcttctgctagagcttaataatgttgcaaaattccaatgtattcatatagattgcttgaaaattagaaaaattgtttgtttttaactgtaaaacgcactttcatttaaagctgacttaaataattaatgtatttttttaatgtattttaaacgatcttttaattgatttattaaaaaaaacaaaaaggtaccacacatcaaaacattttttaaaaaaccatatgatttgtaccccttttaaacaccgtgaaatatttgtcacgtgatttgtaatttttaaactcccaacgccagaaaaacaataatttgaagatcgtaagttctctacatagcgtaatggtgatcgcgtctgactacggatcagaagattctaggttcgagtcctagtgtggaggctaaacattaattttttgcaacttttttaattaattgatacttatttttttaaattatatttacaactcgtgaagtaatacatactgagtcctgccaacagtgatgaagactacaaatttttaaatactattgattcctcagtaataagattattaaattgatccgataaccgatactataacaaacaatagtttattgttataaccgagaaaagctaggttttttgaaaatgtttttttttatttcatttcgtacattgagaatcacagtgatgtgcatgctttcgatgtcttctaaaatgcatttgattataatttaaatctaactttaaaacttgtaaatgtttaatgtgtgactatacttgtaactttaagtcatgtcctctcaataatcttgacacatacagttccttgatgaaataattataaactaatgattttattgtgtgtagttgttaattctttgcaaacatataagaaatggatgtgaataattcaaatataactatttaaacagttctatgggtgatttttttaatttttaactttcagagaaatgaaacagacccttaaccaataaaatctcaaaataaaacaggaaggggtaaaaactatgattttatggtataaattaaaaatcaaaattttttgtataaccatttggcctatcacctttatattttcatgataagctatgcatacttatggcactagtatcaattattttattgtacaaaaaccaacacttttcacatctgtatgcaattttttttttaacatttgcaattacgtaatcagacagatggtctacaacaaaacccaactactttgaaaatatataacatccgatatagtgtaacggctatcacggtccgctttcaccgggcagacccgggttcgactcccggtatcggaactaaatagcaactttatgtttcgattaacttttttaaatttcttattgatctcaaaatatgcaaatgttagataaaacttttttttgaggctcatgtttaaaattaactcaaaaaagcatatattgaagatcttctttcatggaaattgagatgagttttatgagtaataagataatagaaaacaaacaattaatagcaaattatttatatgataatggtttgaaatttatatttaatgaaaagattattcattcaccagttttcacgttaccattagaacattactttttacattatttaatagtttcatttattatttatttaccaagtaaaccacgtaaatatgtttatacacctattgcaattttacatttaatttattcaccaataaataaaatagttaatagagctgatcaattaagtattttaatgcaaaattttgttttaacacaattgtttaatatgacaattaatttattaatgtttgaagaaattgagaaaacagattttaaaaaagatagaaagattgaagatggtaaattatattgggcatttgatcgttgttctgttaatttacgaggaattggatggaattttcaaatgaagaatgtacctgaagcaagtaatgatggatttattaaatttgttatactgaaaattatgttctatgaaattggttttaaatatatcttatatgagatagcaggatatatttatgaacataatggattaggaatgggtaaaatttcaatgatgttatccgtagttatgcaaatctattttggatttaatttaatgtattggattgcatgtgtatcttcagtatcatttggattttctaatgttaaagattggcctgatatgtttcaaatgtttaaaggagataaatggtcaatgcaagttttttggtcaatatggtggcatcaatatctttcaagggattcctatttattgagcaaaagaatttttggaaatattaggaataaaaatttaagaaggatgatgttaattatgggtacatttatcatttgtggtataattcatgcaattggatcattaaatcttgattgggatggtggtaaaaaatataatgatgatgtaccaaatttcataccattagaattgaatattttgaatattattaaattatcaccaaatagatgtttttattctatgtttttatttatttggtcaggaattattgttttgattgaaggattaattgaaagattcattagagaatttaacaacaaaccattatcgattttatggatgattattgtacaatgttatcctgtattaatgtatattggagagttaaaagctggtggattagaatttccaaaatacatggcgagatgaaaaaaaaaaatataaattttgtgtagcagcaacatgattatgtttaccgatttgatttttttattacttttttaggttgtggtttctttacaaataaatttttatatttaaattatcgtatagtatagagtataattgggaaatgagttgctatgaacgaattgaggaagaggaagaggaagaagaagaggaaggaagtgatgatactgttgtatattatggtaaaaggagtagtagaggtagaagaaagtttagagatagtatggaattagagaaagagttgaatattggtaaaggagttgtattaacatgggatgaagaggaaggtgatgaggataattataatgattatgacaataaagaagataaagagattgaatatattgaaatgaataatattgttggagttgaaaaatatgcattacaatatgtttattctgatatagccaataaggaagaaatacgacgaattaatgaatcatttaaatttgatatgattaatgatgaattattaaaacgaggagatggaaattatgatattaaggaaattattaatgaatatagtatttcaatttcaaagacaccatataaggtattattacattcaattaaacccaaaataattgcatttagtatattaagttatattagaggacatataatagaaaataaattatctaatggatcaataagaagagagattatacaattaataataatatctatattaattttaaatgcagttcaaaatgcatcaattggattacagatttacatgaatattttcgttgaaagatcaagattaatggttaagaatatacgtcgattagaagggatttatgagaaatacggagatagtaaaaggattgttaaaatatcagaacagtttcttgttgaatgtataatgatgagagtgaagagaatacgacgatggagtaataatgcagtgttaaagacgtacctatcactatatgatgttaaagagatagatcaagagatagaccaagatcaagagacaatgagactgtgtgaagtcaagagattcctcctctgtgttttaatgagtcttagtattgataataataataataataataccaacatgaacatgaacatgaacaccgccaccctgttgtggatggcgagtgaagagatttgtcagatcttgcggctggtgcagatggtggagagggaacttttttttatagcttatcgctgaaattgaattggcgcgataagttttcatttgctgttacaggttggctatctcttcgggttttctatcctattttattctatatatttctgttttctgttttgagactgtcactgtgattgggtctttgattagacaatggatgatgccagtacactatggcgtatgtacgctaaggcaaagggtggtttaccctatcgctcaagaatggaaaatcttacttggagactcatgtttattaatttgagaaatgaaaagaagaaatgtcttaataataataataataataatatgaatattattaataataatataagtaataatttttatcataatataaattttgatactaatctagacacagaaatagatggtaatataaataataataatattaataataatatcatcaataatattaataacaatgatttcaataatgaaattaataatgatatcaataatgacataaataatgaaatcaattctaattcaaatactccatcatcttcatcaaggaagaaaaaatctgaaaagaaaaaagatataacaaatgatgaaaatatttcatgtacaaattgtcatacaagaacaactccattatggcgacgtaaccctgaaggtgaacctttatgtaatgcttgtggtttatttttaaaattacatggtgttgttcgtccactgagtttgaaaactgatgtaattaaaaagagacaacgtggtgggaaacgaaaaagtaaaattgattcaaatgataattatttaggtgatggtgatgatcttaatccaactccaattgttaaaaaccaattaaatgatgatatagatactagtatgaatgatgatgataattataataatattaatgatgaaaatatagataatttaaataataatttacatgatcaacatcatcaacaacaccagcagaataaggatgattcaaattttgttaatttactatctcctaatttagatattgaaatgcatcttaatatgcatgagttaccaaatattgatcatacagatttttctgatgctttcgataataatatgattttacatgatacaattccaaataccaatccaaataatgcagatcctaattgggaatggttaaatatgggtatttaaagcaggcctttaaaaaaaaaacaatcaaaaaattataaatttataaatttattttacattcattacttatactatacacgtatagttttttagctacgaaaatttagatttttttcattttgtaaataattatactactaatattactattaataatattattaataattttaagcttctttctccaagaataataatgactttcgacgatattaaaggtatggacctcgcatatgaggaagcacttaaaggttttaatgaaggtggtgtccccattggttctgtattaattcataaagatggtacagttataagtagaggtcataatatgagagttcaaaaaaattcaatgacattacatgcagaaatttcttgtcttgaagcaacaaatagagttccagcttcaattactaaaaattgtactctttattcaactttaagtccttgttcaatgtgtacaggttctgcattattatttaaaattccaagagttgtcattggtgaaaatgaaacttttatgggtgcagaagattggttagcaaagaataatgttgaagttattaatcttaaagatgcaagatgtaaagatttaatggataaattcattgctaaacatccagaaatctggaatgaagatattggagagtaattgtgggaagaactctttctgactcgcctagctttactatactaatttttttttcttgattatttccaggttttcttttgtttttatacatttttatactatatttacatttctttcttccttttataacaatgtctactttgaagaaacgtacaggaatagcaacttctacacaaccatcgaagagaaaacatatccaaccttctcatacaattcatatatctaatttaaatagtaagataaataaaaaaaaattaattgaaaatttatacattttactatcatcattcgcagatgttatacaaataaaatattcacctaaacatcgtggtcaagtttgggctgtaattgcatctgatattgatgctaaagcttgtattgatcaatttgatggattccaatttttcgataagaagatagaattatcctatgcacaaaatgaatcaaaattaattgataagttattatcttctacctctacttaatctccaactttcattagtatcaaatttattataaagtggttgaattctctctcgttttttattaatacccaattcaccttcatttgctctacggaaaacttttgatgcatattcaattaaccaaattggatcaatcttagtcgtataatgcatatattctctatttgttaaaacaagtgtatgataaataacatactcaacaccaggaattttaaataatgcagaacttggatgaatatagacagataaattgtctgataatgttttgaaaaccccatcttcatcattacgtccatgatttgtggattttttagcacaattttcaaaaaatcctgaaacaaatgcttttctaatttgatcaaatttgttatcacaactactcaaaactaaattaattttacccttagatttcccatttaatgtatccaataatttaattaattgtttcttaacatcttttgcctttctcattgatttttcatttatgaaattgtcagtacaccaatcttttgaaaatccattattctcccattttctgtatattttaagtaatgttaaatgatctccattataatcatcaaatctttgtttcatcttatctgcaagttctcttttatcccttggtctaaagaaaacatcaggtacacttagcattgaaataatttcaataacttcataactacatccaaattcaaatgatttaattaatgttttagataattttggttccataggaaaatgtgccattaatcttccaacttcagttaataacccatcttcatctaaagcttctaaaatatataattcttctaaagctttcaaaattgaatcttcatttggtttatccataaattgaaattttaaaatgtcattaattcccattgcttttaacattaatatcgtatgtgataaattttgtcttaaaatttccggtttggtatttaaactcatttccttcaagtatgcattttttgtgtataatcgataacatacaccaggaccagttctaccagctctaccagatctttgatcagcttgtgccttagaaattggttggataataagtgaatccatacttctttttggatcatatgcgttaactttcacaaatccagggtcaataacatagaaaataccatcaatagtgatagaagtttcagcaatattagtggctataactactttacgtttacctggtggggccttatcaaagattctactttgcatctctgatggcatcgcagaataaattggcaaaactattaattcctttatattcggatcagatttgtataatatactcattttttcaataatggtttcacaacaggtttcaatttcttctctacctgtaaggaaaactaaaatatcaccatcaggattattgacatgcacatcaataacagtatctatcgttgcttcgatataatctaattctggagtctttgtgtagtatattttgacaggaaatgttctacctttaatatggaaaacaggacaattgttgaaatactgtgaaaattttgtggaatctaatgttgcagatgtaactatcacttttaatgttccttttcttttagcaacagcatcttttaataatgcaaacaaaatatctgtagcaattgttctttcatgagcttcatctaacattatgacagaatatcgactcattaatggatccaccaatgcttctctttccaacataccatcagtcatatatttaatttttgtattaggtcctgtacaatcttcaaatctaatagtataaccaacttcatcacctactttacagttaacttcatcagcaactcttttagccacactgattgcagcgactcttctcggttgtgtacatgctataattcccctatttgcaaaaccatcttctgctaagtattgggtgatttgtgttgtcttacccgaacctgtctcaccgacaataacaacaaaatcattttctctaacagcttttagaagttcccctcttgattgatacacgggtaacgattctctttgttcctgtatacttaattttgattttataccatatgattcaaattttgattgttttttccattcaatgactgctttttcttcaattgcttcattttcttgttgcttttcaagattttccttcatcactgggtcatcaaaatactgacttttttgtaactctcgacgtttctgttcagccatcttcattttttctatcttactgagtttcacgtctttcattaattgactccccgtactagcaattgtctccaatgaagctgtctttggattgattttacgtgtgtttgatttttcaccttctttaactcttcttaatgcatttttcaataacttatccttaaaaggatctaaaaatttgggtatttgattgtttaattgcacttcaatttcttcctctccttctgaaagaccatcacttgaatcaacttctgcaaatggatcatcatcatctccttgtactaatctttgtttctttgcaccataggctgcattgatctgtgttctttcccacacatccatatcattccgacgcttgaaaccagaatttgtactattacttatatgttcatttatactaacattagttcgaggaattgtttctatacccgttttttgatctatatttcttaatcctaaggagaatttcccatcatctgtaattttaataactttaacaaatattccatctcctttatttggtgttatttttgaagattcgaattccgatatatgacataatccttgtttattttcacctggaatggaaataaaggctccaaaaggtttcacagagcttataaaaccttttaaaatagcacccctttcaagtttaagtgatttcatcggtttgatggagaatatggtgaaaaccttgaaaggcagttcgatataaaatgtttagatttggtaacaaattttctgaggataattttttttttcggaaatattttcttacccttttaggttgtttaatgtgtatatttgatcgattaaaaaaaggttctcaaagattatacagaattttatatgattacaaataactttttcgaataaaaacatctcaaaagaaaagcaacagcagcagacgcaagacataagactccacaaaaaatcgcaagtttttcgaatccttttgttgtagtggcattaccaggtggaataaatgatccaccaataattgggcctattaaagaactaactccaccatacaaataaaacacggttaaatatgaataaatatgtcctgtactttggaaaagctgtcctgttattgcaggatatacggccactggaacaccagttgctgatgcccataacacaatgaatgtagctgttaaagcagtattgtgagctggtatccaaagagctaatggaaatatacccgctaagatcaaagagggaatcactatattgattctcccaaatttgtcagccaggaatccaggcaagattctaaatacaattgcacatgcattcactattgcaacactataaagttgaagactttctgaaacatttgctctgatgcaaaataaatcaataaaaaacaatcctgggaatagtgaaagcataaaagcaaaccaagcaacattcaagcattgaaacttcaaatcttttaaaacattaaaattaatccttagaaagttttcatctggttttctaggttgtggtttaaacctcggaacaagataaaatgatgaaaagagtgtcattggaatataaataaatccaataacacgattagcccatggaaatccaatttttgtaatcatacttctaataccaattggccagtaaacaccagctagactagcaccggctgtaataactcctaatgccaaggccttatttttgttgaaatattgtattgtgacaccagttgcttgaatatacatcaacccggaaccaagtccaaacattactccttgaataataaacaattgccatggagagtttgaaattgataaaaacataaatgctaatgatgatataagaccaccaattagcaccacccattgtggtccaatataactcattattattgttgaaggcacagcaaaaaagtaagtgaatgcagcctgtaatgctccaatgattgttaaaacattagatgggatatttggatatgtatgttcataatatgattgataaataccatatgagttacacattccaaatgacattgccatgattgtagcagcggctgcaacaaccatccatgctgtaaagccaccatcagggaactcttcgtcgttctgctgaacttttcccttgtttaatggatatgtactgtctttagtacctgtcattgttgttcagccggcaatattgctgaatgtaagatccataaaaaacaaaacactaactagtatatatatccgttggttttccttttattcatttatctatcgatggttcatatatcttacagtatacaagttagtaatcatgaaattggggatctgcgagtgccgataaaaaatttcggattaatttgttattattgtacaaaagcattcggaaaaaattattgaagaaacaatatagagttgagaattttataaacataagatataaatttaacaatattaataatatacagaagttgcatggatagcaaacatttatttagaagtgaaagcagaaagtttgtgtggaacatcatacattggtaacattaactctaaaagtttgaatttaccgttattgtagattgtgttatctgaaagagtgctgtagagctcttcagcttttgttattttgtaactttcagatttttcactctttacatcaccaaaacattttaacatatcacaccattgccaatttgagttaatatcattatatgaacttgtaggaccgataataactctttcaatagtgtaacccgaattgttcaatataagcatggttgcatcgatattgtatcttatcattgatgagagttcttgtaaactcatttgtgcagaaccatcaccttcaacagtaataactttacctggaagattgaaatctcttaaagctaatgaagcacccaatgttgccggtaatgcataaccaattgaagcccaatatgcttgtaaaattaatcttgcatttttaattttgatttccggaacagcaaataagaatgaacatgtttcaacaatcaatatatcatcatctctaatattttcattaagtgctttaataatattttgttccattaatgggaattcttgtggttcgccggattcttcctttaaatcatagcttgtttttggtttgacatgtttagcagattctgaaattttggaggcatcaattttacttgctaatgctggaagaatttccatcatattagtattctcatcaaattcctcaccaatttcaatatattgagcagataaattgatttgcttcttttgttcaatattaaatgtgaacataccatcattaatttcatgagcaaacttaccaatatgtaagactaaatcagaggattcaacaagatcagcaaccggcttttcatatttaccaaaatagttaccaacatatctaggatgtaattcactaactaaaccttttgaatatgtagtggaatataagttaactttgttgtctagtttttcaactaatgttttaaattctttttccattctgaactttctaataaattcatcaaaaataattgaaacattcttggcgtcataaagttttttaagaatcttatcaacagtacaatcaattttacttaatgatgatttgacttcatactcaagttcaattggtctttgaagtcttgctgaatcaattttcatatctggtaaatcacatggtaaaaaaatgtaaccaggtctactgtttctccaaacatttaagataaccctatccaccatttcacaagcttcttcagcattatcttctaaagatgcagagtcaacactaaattcacctgcaattctttcatatttataatggtcacttttgaggtatgtttttctgttacctgcaagatggtgtagattaataggattaggatttctttttaacttcaaagcactagtaccaacaatatgtaataaaggagcaaactcagtatatgcaccagcaataccattaagagcactcaactcaccaacaccataagtagtgaatacaacacccatcttttgacaagccttcgcataagcatctgctgcatatgaagcatttagttcattacaacaaccaatccagtttagtcccttaacatcataaatgtgttctaaaaattttaaattgaagtcacctggaacaccaaagatggatttgatacctaattgtaaaatacgatggaaaatatattcggaaatagtgatttctttttgtttaatttgatctaaatctttcatttctgcaatcttattgctgttttcagaagaaagcattatatcattttttaaaacattggttgtggattgtaacatgattatctgtttgatcaattagctcgtcttacaaaatttcaaagtaattaaatatataacatatgaaattgaaagagagaaataaaagcattaatcatttgttggaaatgctactcctttatatactacaagtggtctgggtcatcaaagacatcttaagataaaatttttgtaacagatgttggagtatatgccacaatgcgcctctaaccgagacaacatccgccatctgccacaaataaccgccacttaccgaaccgaacacatccttttattaccgaactccgaaccgagaatttttttccggatcacaatcagtctctatttaaatttatgtattaacactactttacaaactgtagatacacattgttactatgtaaaatcatttttctaaaatgtttttagaaatgttagatgaatattgtggtactggagaatgtactgtacgaaaaatataaccgttgtttccactctcataactcgctggtctttcagcacgaactgttgctgagacattctctggtacggaaaattcagtatgtacatcatcatcataatcatgatcatcttcttcaatatccgcttcttcatccaattcagattctagatcacgatcactttcttctgcaattggtaatgttgggaacttcattgatttctttctcatataaagtctactctttctaactggatttgataatctattgtcatcatgctgcttttttagtcgtttagttccatcttcattcccctgatataatctaagcttgttaaacttttctgtaccatcctttaaaaaatctgtaacttcatctacatcatcatcatcatcatcaatatcctcgtcatcaatatcgtcaagagcactggattcttcttcaattatttgattttgcctattggcttttggaatttcatgtttcgcctttaacgtatttacagtattgaatgcccactttgtattcattcttccatttagaggcgatcttcccctatttctaggtgttgaaacattcaaatttttctttcgccccgaagctgatctagacaaggagtccatagaatttgatcttgacaatgcaacaaatgaagaattaggagactctgcttgtgaagacatatttgtggaccagtcacttattcctcttgaaaatttgggtctgttagaattttgtggtgatgatagtagctgagaatttccagtagtgttataattgatttcaggatttaatgacagtgttaggtcgacattgttgtgtcttttcactttttcagatgtttcatcattcctattctcaaacttactgttggaataattaataccatctccattgtgattcccattaatcatattaacgtcagttgagtatccggtcatatatccagagccattggatgtctcagagactgatgtatgagtagaaaaatttgaaattacagaaagaggtcttgttggatttgatctttttagtattgatgcttcaggtgtagcaggaaacatttcctctttcaaaattggggccttgttaactggggtagtctgtgattttggaacaattttgaagtcttttttggaacggttcaacgttttattttcagttccatacatagtattattttttgttgaacaattttgctcagttggtatattattatcattttttagtttattcttggatttgaataaacttctcaaagaaaagtgatgttttttacttcccaaattaacgtttgactgcgatttacttaccgaggaattatttgtaatctttgtactcccactcaaaatactatgttgatcagcatttaattttgaatatctatcatcctcattcatttctttatcaccacctgcatctttaattgatttttcgtgatcattcttcagtaaatttcttacaactttcaaagaaccacttctttgtaatgaagtatttatactgttatcgttacttttgtttgtggataaattggcgccaaagccacctcccatgtttaaagaattttccttttcagattgtattggggaagatgcgaacacttgtcttgcattgccaattatcgatcttgatctagatagtgctaaaacacttcttctcttcttgctcactttcttttctttcctttcatttagatcattgagtaatgcccatattccataggccgaatccaatgtctcctcctgaatcgccctttttaatatctctttatcaacacctgctttaactaaacttttaaaaatagctttctcactagatgtaagatcagaccagctatgttttgtattggaaacattatagtataaattattcacagtgtcaatttgctgttgaccatcatacgcttcaaatactggcaatttcaatatatcctctaatgatgaaattctatcttcaggatctttacataacatcatatttaacaagctctttatgttttgtaattgaacaacagaatcagagtcaatatcttctatgttttctaggaatcggggtctattatgtattattgcatattccaactcttttacatccaatgaatcatcaaatggcatttcccctgttaacatagtgtataacatcacacccagtgcccaaatatctattttaattccattgtatggagttcttttaactatttcaggtgccatatatgctcctgtaccacagtattcagttaataacccattctttccatgcatagagaaaggaagttctctagtaaatccaaaatccgatagtttcacgttcatttgtttgtcgagtaagacattttctaatttcaaatcacgatgacaacacccatttttgtgtaaataatagacagcccccagtacttgagaaaatattcttaaagattcgtcaactgataaatgtccttttttagtaacatattcaaataaatcaccggatggataatattcaagcaccatatatgcataattctccgtaaaaatgatttcatacagtttggtgatgcatggatggtgtctaaattctcgtaaataataaaattctctcattaagttgtcattattaacataagaagcagttttgaaatttacttttgaatttgtagtacttattgataggtttgaagtttcaacgtctggatgattgattagattccttccaccttttttcaaacatattttacatctgagtaagctatgatatcccaaataaatcttcccaaatgcaccagaaccaatttcagacattattttgtagttaccaacatgtgtaagttctgattgtgagaatttagttattaagtttgtgtaatcttgtgctttctaattgatttcaataattatgctgttagtatactgatttctttaaaattgaaattgttttgaaaaaaattaaattaaactctacatacctttgtaaaagcttctcgttcttctattttcaatcgactactcattgtttcttacccacaagcaaccaaaatttgcaacagaatcaattatggatgacattgaggaaggctgaaaacggaactgaaaattgacatgcaacgatttaaaaaatttgtattatcttcgctgaatcttggtcgatgaggtatacgtaatttgtataaatttgatagaataaattggatctactttacaaaaatgcagactagtattacgacaatatacaatataaaagatattaaaataaatgcagtaaagtgagagacaaaaattatgaaaagaccgattgaattagattaaaccaagaaatataattgaaatgaaatttaaaggaaatcatttttagtttaccggtttaccatctaaaacaacaaggaaaccaccaaccaaatgtaaagaaccacaaacaaaaacatccagaggaccttccagagttctgataaagttaacacttgtttcaatatcatggaatagatgctttctagcctttttgtctaacttattgtaaatctccgccatttgagtttgaacatccaaagaatttacagcattattatctgtattcatagaaaccaaatcatctgaataatcaccagaagaccaagtaatatttgttgtaaaaataacatggtcaaatttgaaatttgatgcttccatttcattgaataatgttgtaagtagtatacttggatctcttgtttgttgattgaataaaagaactcttttcttttgtctatctgcaacttgagtaaaccaatgagaaccattcttaacactatcctcagtgtgggcaccatcaataaaccaagtcaattcattttttctttttggatcttcaatgatttgacatctacctggccattttgcagtttctaaaccagtaacaaactcatcagataaagtatcaatatcaaccttgtatcccaatctatttaaatgagcatgacataaagaaatagccaaggatgcattttgtctttgaaaattaccattaagacctaattttatatctagtagatctgatctttcaggcactatgttaaaggaagcaacatttttttcatttgcacgattttcaataactttcatagctgattctggttgattaacagtgaaacaatgtgcgttttttttaaagataccagctttattccaagcaatttcttcaattgtattacccaacataactgtatgatcaatacctaaagcactaataccacacgcagttggagtttcaaaaacattagttgaatcatattcaccaccaacaccgacttcataaatagcagtatcaacatgttcacttacaaatgcatgaaatgataataaagtaaggtaacggaaataagcaggtttaataccatcacccatatgagggaaaatattggcatctgatttggagttatctaaacggttccaaatttcaaaaaaatatttagtaaatagttcttcactaattggtttaccattaatgataattctttcacgaacagtttttaaatgtggtgaagtatataaaccgatttttgtaatttttgaaatatcacttgatgcatttgatgaagttgagtgcgatcgagtattgtttgataaattgttattatccttgatactattaacatcacttaaaattgaattatcaatattgttagcattattaagaatcactggtaatctatattgattcaagatactttgaacaaaagcgcaggttgaacctttacccttagtaccagttatatgaataacatttaacttattaaaatcacttggtttataaccaattcttctaacccattcaatcatttcaggcattaacattgaatttctatttattcccgattttctaactgcatcaatagttgcaaaatttgattgcaaagagtttaaagcattaattgcttctttataggtacgttgacgattcatattatttgaggtattggaagcgggcttagaatgatctgatgatgaagctggtaaatttgtagaagctgaagttgaacttaaagttggattattgtttactgatgatgaatccatttaataatgagaataataaggaaaaaatataattagtcagaaaatgtattttattttggctaactgaaatcaataaatcaaaaaatagttgatgatttttttgctgaaatagaatatagaagaatgatgaataaaatgaaaactgagatcttaatttgaaaaatttcccaaaatttccaaaaattgaagcacttgaatgaatctactttaaattattgattattaccgtaattttgatcaaacaagcgtagatatgtaaactcaattaaataaacaaaagatttaatctactgtaaagagtaaaagcttatatttaataagtaaaggatcaacgtagaaattaattatattaccttctaaatttcaccttagttaatttgttgctcaaaaaaagtgagattttcaaaaattgaatttttttttttaaattaccagatcaagtcaatgttctctgtgtgtgtgaaaaaaccgcttaaatttggaggtaattggtctgtcactgcttgtatgtgcaccttagaggggacacttttaatagttttaataagtgcaactcaaacagcaaatatcagttaatgaataaacagactccaaagttgtctatatattggaaataaccaagtaaaaggcgccttaattaattaattatatagtaaaagggcgggaaagaaattactaattttctctccgtcaaatgacagggtcttagtcatattttttgcacgacgcgtcttcttccagactgtgagatgattcgacattcatttaatttaatatttaatttaataatagtagtcaataatatacataatacaacagaaaagagagagacaaagtgcttagcactttatataaaagagggctgtgagtaaaaaagaaaagaacataaactcgttagtaaaagtaaagttaaagttagtttaaagagtagaagtaaaaggaaaatggaaaactagaaacattagtataaccattagaaatcatcatcaaaggtgaaaccaccatcttgactagtttcttccttattactcttagccataacaccagctttttgataatcagaaactctcttttcaaagaaattagtcttaccagcaagagaaatattttccatgaaatcaaatggatttgtaacattataatattttgaacaacctaatgaaagaagtaatctatcagcacagaattcaacatattgacacattaaatctttattcatacctaataaattaacaggtaaagcatctgtaaaatatctcttttcaatatcaacagcttcagtaataattttaacaacaatttgttcatctggggtattatttaaatgagaaaataataaacatgcaaaatcagtatgtaaaccttcatctctacaaattaattcattagagaatgttaaacctggcattaaacctcttttctttaaccagaagatagaagcaaatgaacccgaaaagaaaataccttcaacagctgcgaatgcaactaatctttcaccaaataatgcatctttatcactcatccatctcattgcccattcagccttctccttaatacatggaatattttcaattgcattgaataaaaattcactttcctttggatctttaacataagtatcaattaaaagtgaataagtttcagaatgaatattttccatcatgatttggaaaccatagaaacatttagcttcaggaatttgaacttctgcactgaaattttcaactaaattttcattaacaataccatcagatgctgcaaagaaagctaaaactcttgaaataaaatatctttcattttcatttaatctattattccaatcatgtaaatcttttgataaatcaatttcttcagcagtccaaaatgatgcttctgcctttttatacatttgccatatttcatgatatttaattgggaataaaacaaatcttctcttattttcagttaataatggttcacccttttcaagttccttaattttatgtctatgaactttatgcaaatttaaaaatttttgatgttcagataattcttcttcaacaacaactggttttaaaccagctgcaactgcctttgcattggctgcagcagttaaagttgcagtaagatctttcttatcagctttgctgatatcaagagatgaaagtgcattagcggtaactttagatggtgtttcttggacagacatttgtttctattaatttaaaggtttgttttactgaaaggaagtaattataaagaatatagacaaatagatttgaaaaggaaagaagaaacgtaaatcaagtacgaaaaaaaattcaggaaaatggtatctttttaacttaaaaaaagtacgcgtccatttgccctcaaaagacctctttcttctttgacacgcttctttttacgcgtcgtgtatccattttcttagtatgaagttgaaatcattccatttaccttttgtgatctatggagttttgctgtccctcttttcactctccttgttgtgttgtttacatttacttgttttaagttattctccgatatcttctattttctagtggaatgatcatcccttgtttatcttttgtaaatgcgaaatctccggtttattccttaattacatcaagtaactagtttattatttttaaaaaatatgtatacatttaaagaattttacaaacttaattcaatttacttaagtattcatgtaagtagatgaatcaacaccttcagctgggaattcttggattttaacatcaaatctatcttgaatattatctaaaatttcttgatccttttcagttgaaataaatgaaacagctaaacctttagtaccaaatctaccagctctaccaactctatgtaaatattgatctgcttcacttggcatatcataattaattgctaaattaattctttcaatatcaatacctctaccgaaaacatcagttgaaacacagatacgtttattatattctttaaataatttatatctttgaattctttcttcttgcggaataccagaatgaacaacaattgatgggaaattagaatcaactaataattgatttaatgcagttgctctctttgttgatttaacaaagataataacttgattaaattctaatgaatctaataattcagctaatttagcatttttcttatcttctgctaatttaatgtaatattgttgtaaaccatgtaatgttaattttttttcatcatcaacataaatttccaatggatttttcatgaactttttacaaattggtctcatttcatttgctaaagttgcagagaacatcataacttgcttttggaatggagttgctctgaaaatttcttgaacatctcttctcatgttgatgttttctaaaacattatcacattcatcaataacaaaatttttgacatgttttaaattaattgcattatctctaaccaaagcagttaatctacctggagtaccaacaacaatatgtggacaagtttcctttttacttaaaatttcaatatctttcttaattgaaacaccaccatagaagacttcggtcttaacatctggcatatatttggaaaatctagtatattcattcttaatttgataagctaattctctagtatgacaaataacaatagttgagatctcacctggaactgggtctaattgttgtaaggtagataaaacaaaaactgcagttttacctaaacctgacttagcttgacataaaacatcattacctaaaacagattgtggaatggtagattgttgaactatcgtaaaaaaacgtaaaaaaaaggggggggggggggggggggaggataaatatgttagtttaaattgtgttcttaaataataatttctatcttatttacttcttccaaactcatgcaattgattacccacaaaaattgtcttatatagtacttttgaaaaaatactaactgagaaaaaaatattgtactttttaatgataacaattaaaatcacatcaataaagtttgattacctcaataaggatatcttcttttttccttacttaattgaaaaactagatataatgttataattcaatgaaaaaataccaattataataatattccatcaagatgagcccacggcaaaaaaaaggtaaattaaccatcctgatgtttcatatactcattgattgtagaattatccaaatcggattaatattatatcatcagtttgacctgtgaatatcaactgatgaggatgaaagatagtaaaataagaagataatgtgattattattattatattgtaaataattaatataataatacattgaaaaatgaaatactaaccttctgaaggatgttcaaaaccacaatcagcaatagctctcattaattcaggttttaaaagaaaatctctgaaaccggaagtgtgaatactgacatatgaacctttcttgtcagcttcatcaccattaactgctgcgacatcagcattttcggtttgttgttgttgggtgacttcttcggaatcggagtagtcaagtaattcttcttcaccttctgcagacattgttaattgattggatctgataaagtaaaagtaaagttaaatcgaagtgcagacaaatttcaataacattaagttgttcactttgatggagagcgtcgtaaatttccaatgaagaaacttgccacctgctcaattccataagttatttaagtggtgtacagatttattaattttttaaaaagacgcgtctaatatcattacgtaattgtttaaaaaacacgaaattttacatcatttaaacacaacacattgatatttgcactaagtgataaatttcaattcaatggcaaatcagtaacagcaatttcttattagagagtatctgtattgaacaataacaagaagatatagaggcatactactgttgaataaatatgtcatccgaatatgaaagaatttatctcaatcattctaaattaccaggtagaatgagaattgcagattctggtcttggttggaaagctcaatccgtacctggttcaacaaccaaatccaccccattccttttaccaagtactgaactgtctagttgttattggtctagaggttctcgtggttatgaattaagaattgatacaaaaaataaaggtgttgttatattagatggatttgatgaacgtgattcagttggtttaaaacatgaattatctaaaaattttaatattcaattagaaactaaggaacattctttaagaggttggaattggggtaaagtacagatggcaagaaatgaattaatttttaatattgcaaataaacctgcttatgaaattccttatactgaaatttcaaatactaatttaagtggtcgtaatgaagtttctgttgaaatggatttattacatgaaaatgatactgtcgaaagaacgggtgatgaattagttgaaataaagtttttcatacctggtaatgtagaaatgaaggatgaacaaatggatattgatgatgatgaagatgatgaaaagaaaaaagtaaatgcaaatgagaatgatgaaacaaagaaaactgataaagatggcgattctgaaatgaacgaagatagtgaaaagaaagatgattcaaagcaaacaaagacgaaaacgagggctgaattgtttgttgaagaattaaaatcaaaggcagatattacacaagttgttggaaaagttattgtttcatttgctgaagtattattccttacaccaagaggtcgttatgatattgatatgtatgaaaatttcttacgtttgagaggtaaaacttatgattataaattacaatatacacaaatattaagaattttttcattaccaaaattagatggaatgcatcacttattaattttgcaagttaatcctcctttgagacaaggtcaaacacaatattcatttttaacattacaattcgacgaacaagaagaattagaagttgaacttaatgttgatgatgaagaatatgaagaaaaatataagggcaaggtcaataaagtttatagttcaagttcacatcttgttgtttctaatttgatcaaaggtttcactgaacgtagagttgttatgccaggtacttatcaatctaaggatggattaccaggtattgcatgttctttaaaggctaatgaaggtcatctatatgcattagaaaaatgtgcattatttttaacgaaaccaacagttttaattccatattctgaaatctcattaattgaattttcaagagttggtcaaggttcagctcaaaaaacttttgatatggaaattgttacatctaaaggtggtccaactcatagttttggtaatatagacagagcagaacaaccattacttgaatcattttttagatcaaagaatttgaaggttagaaatgatgaaaagattgctcaacaaatgcttgcaaacgcaatgattgattctgatggtgaagctgatttaggatctgctgatgatgaatcccctgatgaagatttcaatagtgggggctcagattctgaagattctgaagttgatgaagaatatgattctgatgctaatagtggtggaagtgatgatgaaggtggtaaacaacctgaaaagaagaagcaaaagaactaagtatgctaatatatttactagattaatgtgttcactaatgatatatattgtagagtttattatgtaaaaaatagttacagttaatatttaaaagaaatataaaaaactataggaaattaaataatttgacgctttttaagttcagataatattgcttgttttaattgttgattatccattttatttataacattctcatttgtcacttcaaatagtgaaactaaatgttcaactttattcaattcttggatctttttatttttcagtaaatttagatattcaactaactcatctgtacttaaactttcaatttttctgttgtctttatttttttgataatttttatctttacatgcaatttcagcttttcttcctctatcaggtacattttcttcgtaactatcattgaaacttttttcctcaattatagtatttaattgtctaaatttattgaagtttaatcgaacttgatcatttgcacttatgatgtaagactgattaatttgataatttcttttttgattttttgcagtctcttcatttattagtgttttaataacatcttcatgaaactctaaattgaaattctttttcttagatgagtattttattttaacttcctcattcaaatcagatatactgggtagtttatataatgttttcatcatttcgtatttgccagcaatttcagataaggattttagagttggatccaattgctttttcaatttattaacaattgcatcaactaatttgttttcatcaaacgttaattgatcttttttattggaaattgagtcaagtatatcctctgatgtctcacttttatctataccagaaggtccttctaaatcgccaagtatatctcccattttgacatcactaaattgcaaacttcctccactgcttactgaaggataaaaagaatttgcagttaagttttcaatttcagcttttgttcttttaagacttccagaccgatttgtgctatctgaggatacagttgatgttgctttaacttcagagtcttccttttttaattcttccttatcctccacatcgttatctaagttaaaagtatctgtgaaatcatataactcaaatccatgtgttgattgtgaactttcatcagatttttggtcattttcatcatcactgaaaattttgtccctctcgtcttctgtatcaggagtttgcataatcatatcgtaagatttggaacgaaatattgtttttgtttcagatcctatatcttcataaatacttaaattatcatcatattcgtctaaatcaccatcaatgacagggtcttcataattacttgagcctgttgaaagattatataagtagcttaaaaacccttttccagtttcacttgcttgttcttgttcgtttttttttcctttttcttttacaatctttgtttaactctgtctgaaactcattcatatcagaatcattttgatcactggtttttaattgtgataaaatcgtttttagctcttctaattcttctcttgttgctgtaagatttgacattgggctttattactttgcatagaaaactatatatgatgagaataaattaatagataatttaagaaaataaaccttttaaaattctatttaaaattatgactatactatgtgatgaatcactttttgatgtaattaaatcaccatgtagataatactgtttatacttgaaatttgctaaaaaaaatatgattcatcatgtttaacttttttttttgttaagttattagttctattgacataaaaactcatttgttctatgtaaatcatgtttcttaggaattttgttaatactaatacaaaaaatattatgtaacttcctaaaagagtaatagattatccattttgagtaaattaattttttttattcagtttgagcgaaatcgatgactgttggatcgtatatattctgtgatgactacacttacagatcaaatcatattctgctctaccttacacagtaaaatgtatcctgcaactttttattatgctaattctgtagttttatgtgaatcagcgtgtaattagttttacctattctgtgatttgaaaagactataaaagagagcacccattccagtttcttttcgatttggtctttccactttcctctctgttttcttcttcttcctttttctcttttttcctttagtatagtattcttatattataaactcattataaatacaatctgtattaataaagacaacaacaagctattcaccagcaattaattttttttattgaagtcaaactcgagaaaatttcattaaagcacattttttatttcaacatgtcagacaattattcaactgatagctttgcaacaattgcaaaagaaagcaccaatgaaaccacttctgagctttcaaatgcaacaacaaccacaacaactaataaacaaactgttaaattccaagcatggaataattttattgatggatttaaaagaaatacaaatggtgaaaataattctgaagatggtgataatccagatattgaaaaacaagctggtggtgatggtagtttaaagaaaacattaaaaaatagacatattcaaatgattgcaattggtggatcaattggtacaggtttatttgttggatcaggtgctgcattaagtagtggtggaccagcatcattaattatttgttactttttagtcagtacaatgatttttacaacagttcaagcgttgggtgaattaagtgttacttttccaatcagtggttcatttttagcattaaacaccagatttttatcaccagcatggggattttgtatgtcatggaattatcttttacaatggttgattgcattaccattggaattagttgcatgtgcaatgacaatgaaatattggaatgatgaagtaaatcctgcaatttgggtcacaattttccttttaatgattgcattgattaatttatttggtgtcaaaggctttgcagaagttgaattttcattttcagttattaaaattattgcagttattggattctgtgttttaggtgttgtcattaatcttggtggtggtggttctaaaactggtcatattggtggtaaattttggcatgaacctggtgcatttaataatggatttaatggtttttgttcagtttttgttacagcagcattttcattttcaggtactgaattaattggtatgacaagtgcagagactgaaaatccaagaaagacattaccaaaggccacaaagcaagttttttggagaattacaattttttatatggtttcattaacaattattggattattagttccatttaacgatccaagattaattggtaattctgaaggatcaggtgctgaagcttcaccatttgttattgcagttagaaatgcaggtattggagttttcccatcaattatgaatgcagttattttaattgcagttttatcagttgccaattcatctgtctttgccacttcaagaacattaactaccttagcaaagcaaaattttataccatcaatttttggatatattgataataaaggtagaccattaattgcaattttaacagcattagcatttggtggtttaggatatttatcagtttgtaaagaacaaggtgaaatattttcatggttaatggcattatctggattatcatcaattttcacttggttatcaatttgtttagttcacattagatttagacaagcattaaaatttcaaggtagaagtgttaatgaattagttttcaaatcaatgagtggagttattggatcatggtggggtgttttcttaaatataataattttaatatttgaaatgtttacagcaatgttcccagattttaataatttaaaacatattgaaataataaattttttcaagattaatttaaatttattttgtttattaggtatgataattatttatgttttatggaaaggtagaaaaggtggatattatattaaacttgaagatattgatattgatagtggacgtcgtgaagagaatatggaagaattacaagaaataattaaacaagagagagaagaacttgcagcaaagatgtggatttatagagtatatcatttatggtgttaggagatgatatacttagatgcttagattgagatagaggtgtaattggtttgtatttgagtttttgtatttgagtttttgtatttaagtttttatatttgagtttttgtaaactgtataatttaaaaaaataaaaaaaaagtattaataacaataataatatcaaagaaataagctcaaatgtgaatttgaatatgtatttaaattaactaaataaagcttaaagtattttccttataataaattttgtaagaaaacatgagaccaaaaaagtggtagcaaaaaaaagcttgagaatttgaaaaaaaaatcaatttcctgaacagtcaaaacgtgctttgcgggtgttcaaacttaaattttaaaatatgtcaaacaatggaaggtattttggatatactagaaaactgacatttggttattacataaaattattgactctttgacttcttgacatgtaaagttattaacttaacgtaatttatgagtaactagacatatcgtgaaggaatgaaagaattgacaattcaaagagtatatattgttaatgccaccggaatatggaatactacaatgtaagtaagagtaaaatacaagataatacgactagatttagactaatttgatataatattcatcaatgtttttaattgttaaatcattttactgattaattgatttctattgttttcaattttttaattagcgaattagataagactggatttaaagtttgtattgtatagtggtatatagtaatatttttttaaggcacgaagagcacgtgggaatgttgtattaaatacaatattaatagtatattaataggaagagattatgagagatgagaagtgtagtattgacgggtgtattaaaaccgcaatagttcataaaataaaataaaataaaataaaataaaagagcatacatttacagagttagtccccatcaagtctattatattacttcgctctttaccatttcccttttaagttatctctcacacgacaaaattattttattagacgctttgcctcgttttctattatttaagggtaattttcttttctgtcttatattaatatttaagaagggtgcagtctgctgttatacattattcttttgttcgtttaggattctattattattatcatttgacaaacgctctcttatcaaagtaatcctctttgcatattaaccactctcaatatcccctctaatgaagttcggtgtagaatttgctcaacgttctataccgcgttggaaaacttacaatattgattacaatcttatcaaatcactgataaaggatgcaacttcagattttgatgatgctgcatcaagtagtgataatactaataataataataacattattactaattccaattcaaaaactaataagaatgattcatctgcttcaactttggcttcaacttcaccatcttcctcaaataatagtaatgaaattcatttatctgaaaggcaaaaaaaatcttttaaaaaattatataaagcttttaaagaacaaattgattttgtttccttatttgctttctctaaagttggtgagatttctagacgtttagctttactcaaaagacaatgtgatttatttatcgaatcagaatcagaatttaataatgataatgataatgataataataataataattcagatatttcaattcgtttacgtaatagaaaactacttctatttcacaatgaattaaattcaataactaaagaattacaagatttatccagattcatattacttcaaaaatttgcattaaaaaaatcattcaaaaaatttaataaatattcatcatatccaaagaaacaattatttttaaataaaatcactcaaaatttcttgattgacaatgaaaaatcttttgttcatttgaatttaaatgatttagctttagaaacaactctattgtatgatttcttagatactttcctaaataataataataataataataataataataacaccaacaacaacaatagtccaagtaaaaaattaatagcttcttcaagtttaaagaaacaaagacaacgtgaatcttcaattcatacaattgattcattacaattaacaacaaatactaaaccttcatcatctgattcacctaattctaaaactccaattttttcaaaatcaacaacttttgatattgtctctaaaagaaaaggacctcgttcacttttattttgggttcattatgataatcttgatgaagttaaattcttgttatcttctgaattcaaattaattactgatgattcattatttactaaaaataaattaaagagtacaaaatcaatgatggacttacaaaatagtcaatcttcaactccaaatgataccatgaataaaataaattgtaaaacaaataataatcaatcagaggaattttgccctgaaactgatactgtctcagtttggcttaatgatccctcaagttttaaatttgttcaaaatgtttcacctgaatctttaaattatgatgttaaagaaaatgataatttgagaatttttagtgcttcaccttattcacaaattttagtctccaactataaatcatcttcaatcaataatccaattttaataactccagttggtggtttaagacaattctcaattgcaactttaaataaagaattagttgattccatatttaataatgataataatgataattctatatcaattgatgaaaagaaacaaaaattgtttaatgaatgggaaaatagtggtttaaagggtaataaacaaatgactcaattatcaattgattgggttttagataataatgttaaacctttagcaagtgtttcatcaaaaaaattacgttatgttaattcaaataaaaataataaacttgatttctatatttcattagaatggaatattcaaattcataaatcaactcaaaatggtattgaagatccaaatgttcaaacttttcctcatgctttattggaattaaattttgatgttaactcagaatcagaatttcctccaaatattcaaaatctaatcaacagttatttagtttacagagttgataatttaaatttctcattaaataattatctgatatatttacacattaatgaatttcatcaaaaaaattccggagataataacgatgatgcagatggtaatgaagaagaagaaggtttatccaatcaattgaatatatcagatgctgaaatgctcctctttattgcacattggcatgatattttattagaaaaagatattagaattttacctgaaatgaaatctcaaaaaccaattgatattagaagctcgagtgtcaatcataaatatcatgatgaaagttattcaaataatgaatatgatggcgctggcgatggggaagaatctgatagtaataatataatgaatcaaaattcaggtattctattaaataaacatgatattgcaccacgtaagcctggctattggaatgaatttgataatggatcagattataataatgatacattttatgtttatgcagatgatgttaataatgaccataattcaaatagtttaattagttggttttcaagattattttatgcaaatgtttatgatgatgatagtaattccgatacattaaatgatgatttagaaatcaatccaaatatttattcaaaatcaggccaaggtctggaatggttatcacctgaaaagattgaaaaaatttcagaacttgcagataatactaaaaagttgggtaataaaattaaaaaatcaattttagatattacaggtttaagtattgaaggttcacaacattcacaatttagtgaaaatactccattattgtcaaatgattcaaatcatcatcaacctcattatactagaagttattcatttggtgctaatagtcaagattataatgctgatgaagaagatgattcagatagtgaaactgagagattaatggcacaaattccatcgaataatcaaaatgtttcactaaaaaaatcaaattatattaataatttacaaattgatttacgtgctaaacatgataatcttttatcatttttatattctacattgacaatatttgcaatatttatttcaattttcagtacgattattctttcatcaatttttaataattcccagaatagtggaggtgttccaaatgttaaaggtggattcttattaataacatttgcactgataggtttagtattgagtgttatattaacaggtttcagtatatgctttttattattcagatattccactccatcgatttttcattcaagttttgtttggactggttcattaatatcaacaattcttttactttatggaatcattatttgcttttgattgaaatttttcattaaaaaaaaacaatgaaaaacatcattttattattattattattattctttacaaagaagtagtgaataaatattacttagttacagcatttaattatcattttcacagttacaattacaattacaatttacattcaaaaattatctgcattttatattcaaatcgctctctttcagttcaatgttttacttaatttacattctttttatttttgcttccatttttaatatttttatagaacaatatataatacataaacatcaacatgacattttcacaatttatactaacttaaacccgaatttctcttgagcatattctgcaccaaattcattatattcatccctagtcaattttactttatcaaatccattatgttggaaaaactttttacctgcatgccaagcaagtagacttttatcattagttatatttgaataatcaattatattacaacgagcttcaattggtacctctgaatctaaatctttaacaattctatcttcaaaacctttaatattagaagtaccaccaatacaaacaatattattaactaataagggaaccaacaattcaggtactgcatcaagtgatgctttaatagtttgtattaaacctgatttataaacacctgctaattgaggatgaaacaataattcaggtatcataaatctttcatcagttaataataatgattgcatcatatttgaatcatccaaattgtcatcatttatttcatcatcatgagttttctttgttaatgaattttgtaatttaatatattctgccttagaaagtttagaaatatcatcgattacatgaccttcaaaatcatttttattatttggtaatacataagttaatgcatattttgatttcattaatttatttggagttttctttaaaattgttagattatttaatgcttcattgaaatctgttgcaatataacatgctttatgtttaattgaattgactaaaatcggttcctctgttatattataatgtctaaatgaaacaatttcacgtaaataaccatttaaaaatttaccaccaattggtaattttcgtattgctttataaaatggtaatccattaaccataggtattatccaagttgcatcaaatcctgaatctatgaccaattggaaatttttataatttgttttttcaatattattattatccgtattatcattacaatttaaccaaggagctaaagctggacccgaagttctaactaaacttccaataccaagttcctcaaaaagtatttgatcggccatattttgaaattttggtaatattataggtgattcaatgtaaagtaaatttgaatcaattaaaaaatttccattacctgaatcaatttttgaatcaacaaatgcattatcccaaatttgatgttctaaattccattggtaacattggccatttttaataggtcgctgaaatgaaatatttgataatccacctgataaaattgctaaatctttcattgacttttcattatttaattttgaacccaaatgaattcttttatcttgtgttctaattatacaattgggtacaataaatggattttcttgttctattgtaccaaaacgaacttgatattgtccattatctatcacaacattcttttccatagttttatgtactattcgctgtgtattaacacctgtatttcttcttttcaacacttctaattaacaataaatcatgtattcactctgtttcaaacatgcaaattaaatatcaagcattacgtaatcaaataataaatgtaggcgcgtcgcattttaatttcggggtttgaattttcattttagttgtaacacagataaagatctattgcatagtgtattaggggggtttgttgttgatgatatattaaatgaattgaaagtactgcattgagtgtaatttggtagtaatgacaggatataaactacttataatgtcaccaattggaattagttagtacacaattggataaatagagataaatcattatcgattttattaaaatgcatctttcatgttttttcaagtttaacattatagattgtacatttttttattgtgtaacttttattgttttatctttggtatttttttcatcgttttgttttgtaattaacatacatttaattcggagtagacaatctctccaagaaaaaggtatctagttgaacacaataaatttttcaaatacattgtatttttatattttagtattttaatatttttaataattacagatttaaaatgtctacgttaaaacaaaacactacaagtcaggcaaaacatgtatctagagcatgtttagaatgtagatcaagacatgttaaatgtggaggtcaacaaccaatttgtgaaagatgtgaaaaacgaaataaagtttgcttgtatgttaaaagtcatagagggggttcaagaaagaaaggtgtctctactaaagataaagtaaaaaatgttaataatgatattgataatatcaatgaaaatgatgagtatgttgaaaataataatgataaatctttttacaatcaaatgaatgatcagaaaagaagtgtaagtctcgaaacagacttcaatagtataaatcgatatccagattcaatattcaatgattctaaaagtattagtcataatagctccaataaatcgaaccttaccagttcatcaacaagcaattttagtccggaatcttttgataggaaaaatcataaatctgatatgttaccttgtgttaaaaatggtatgcatcatttagctgatgatccaaattgtactgaatcatgtctaaactctgaaaattttaataaaataccaccatgtatgaaatcatcacatgcatcaacatctcaaaatggcaataaaaaagttgattattatccagtttttaatgattcaaaagaaaccgattcaatcaataagatatttgatgattctaaattaatgacctcacttgataaatgttacatctcaccaagtttaattaaagatattaatgttgattcaattgtttccttattttacaattcattttataatgcacatccatttttaccatcaaaggaaaacatacatttatacttagattcgattccgtataaatatgatttactattagctatgaaaataataggtgaaggtcaaaattcaagtaaatatgcaagagatgtggaaactataaatttccttgtaagttcattattagattatatacggcagataggtaaagattttctctctctacaatcattattactcttagctatgataacacatatttcatcattacatgatttatcaaataaaattagagatgcaacaatctcacttgcattagaaatgaaattgaactttattgatcaaaacaatgtttcttctagctttttagatgttaatggattcttaacagagagaaatggatcatcatcggcaaaagatttctcattgaataccccatctgatacagattctaaaaattttatagatcaattatttgattctgagagagtaagttcaattccacgtgaaatactactcgatactatgagaaaaacattttgggaattatactattttgattcaatatcaggtactgcatcaggacatacaaaatcaagattagcaatgcagcgttgtttagttctttatcctacttcaattccactttcacaatttgattacaaatctcgagcagaagcttgtaaattggtgaatgattcgatctctttgaatatagcaatacaatcaaataatgatgcattaccacatttaaatcatatgagagcagcattgggaaactgggaaatgaaattatcgaatcctgatacttttggtatgccttatttgattaataaacttggaattgttaatgatggtgtctttgaagcaataatgttgataaactatgctagaattttcacatatagaccattttcttatctttggagggaagatgtttccaaacatcctagatgtactgacgaaaagggtgtcgatgatccttgtgttgccttaaataataaagaagctcaaaatgcatccgattctaggaaaattatagagacaagaaaaacaattgactcagcaaatttcttagttaaggctttattagatactgatccttcacaaacatgtaaaagaactccattcttagcatgtgctttggcattttcatgtcttgttcatttaagtgcatatgcttggattgaatcaaatttatcaatgttggaaaatttagatgaaggagataaacaaatttcagcatctgaacttgatgtttatactgaatatatcaaacttgagattggttcaacgttacaaatttctagacattggtcattatctgcaaaattaatcacacatattgcagagacattatcaagagttagtcctaaattatataaaaaagttcaagctggtattttaggtttaggatttaatttggcaacaataacaactcaaacacctgttcatgatgaagcaccaattaaaattgaatcaacagaggcaacctcatcatctgatccatctgatcaaaatgaaaacaaaaccttcttatctaagtacatgatctcaaaaaatgagcaaaattataaacctacagaaaattcaaacttaacaaatcatatatcgaatacacaaaattcattaaatatacccgacgaaacacaaatacataataacattgataatttgaacaatactctcaataacagtaataataactttatgttagaatttgctgatttagttaatggaatgggtggtaatggtaattcagattcagttcttggattccctcctgaacctcaagattacgaatttttagatccattaagtccaacaagtgatacagggtgtgattgggttgataaacatgattttatctttgatcaaatatccactgttggtgatctatagtcttgtataatttatattttgtaaaattaatttattattcacgttctaacaaatcaatctttaagaatatggggtatgtcatctttgatgcgacacaaattgttgttgtaataatgcgacatgataagttgttgtggtagaagtcctgtcaggtaaaatttagtgttttactactcgtcaaagtgtggtaaagcagaatacaattggaagttgtgtgaaattcttaaattaaattaagattgtagtgtttcatgtttaaaaggttgatgaaatcagtcaaaaaagactcttttaaaattaactatggaagttcaaaaatttacaacttgtcatatatttttatatttttgaatttgttttggatgttcaaataggtaaaaaatggcactgaaaaaaatgaacttttggatacacacacctacgcttacacccacatacacttgtttcaataaaaaatagccatcaaaatagctttccaacaaagactttgaagagagataagttttgaattttctattttggaggctcagttataccaccgaattaaatttttatacagttcgattatacagattgtctattttttaaatgaagataccaactccagaccacgtgatagaattccttcaatccttcccttcagaacacctgacttacatacaactgtaaagtcattataattaattgtagcttcattcttaccaatttttatgacaccagatttttcatctccttccaaattgctagttaaagaatcaccaaactgtacttctaaaatttgtatgattctagctaatttagtttcttctgtgacattggcatgaccttccgttattttaaatagggttttttcaacttttatatcggtaagaccatcagagggttcttgtttaacaatatcaccattttcttcctttatttcgtccttgatcccttgtttgatatttccatcaagattttcttccttgaattttatctttgagtcctcatcttccgtttttagttcctccttaatcttttgctcacttatgtcttgattatcatgattatgatcatgttcagagtgattgtgggaacaacttttagatgtaagtttcacactagcaggcaatgaatcacaacttaacaaaattgcaattgccgaatctgcaattgtgtcttccatcgcaccacattcccattcaacgtatgcaatatattgtttgtcattatgtctcactttaacacaatccatgatttcaaattcatatacatcctctgaatctaacagtacatttactgagccaaacatttgagagaattgccaatggacaatacttctattagcattacaacgtagtaattgtttttgtgttattgatgtggttgttaatgttgtaaattctttaatatcatcaacactcattaaattgatatcaaaatttttctggactaaaacaccctctaattgttctttatcttcagtaatagcggatgcaagttttccaacaacttttgcaactttttgagccttaaattctagtgataagattgtactgtttctaggattatagattttaatttcatcttcagttgattttaatttttggtattttgaaagtaacgcagattttagtctacccattggattagactcaccatgaaccaacactatagttttaggactaactaagtcaatgaattcagcattttgttcaaaatcaacatgggcagcaaatgagatttcttcaacatttattcttcttggaaccataacttcaggattattcatcgatggaatctcatttggttcacgtaaaaggttcttagccaatgttccatcaacggaataaccagtcataataactgaatttcttggatctggagaccatttttctaaaattcgtcttgataaaccactttgtaacataccaggagatgctaaaataacacaaggatttgaatctttcattctatccataccggctatacttttgatatatttgaaaaaaaatggattcgtattagaatctgtcattttctttctaattgattcattcatcatatagatatatctttgataaacagccatacatctttttgctaaatctgaagcgtaataaattggaattttctgaagatctttatgctgttgccaatattcatctaaaattaacaaaatttcttgtgctctacctaaagcaaaaacaggtaataaacaacgaccaccctgttgaattgtagaatgtatcatcttagttaatttatgttctctttctaatcttggaatatgagttgcagtaccaaaggtagcttctgtaatcaaaagatcaggttttgaatgtggaacttcagctgaacttaaatgtctatcttcttcacgtgaataatcaccagtaaatagtatcttcaaaccaccaatttcaatgaaaaacattgcagcacccaaaacgtgccctgcatgataggcagtaaatttgataccatcaacttcaatagttgaatgataatcaacagcttcaattttatcaaaagaatcatttaagtcctcattagtatagaggaaactattagcacgatcacccgtattatcaatatcttctgcaatattagtaacacggacaaaatcattcaataaccatttataaatggcttttgtagggtatgtcataaagactctacctttaaaattagtatgttgcataacatacggcaaagacgctgcatgatctaaatgaaagtgactaataagtaaaacatctactctggacaaatcaaaatcatcataaaagggtaatgattctaatccagtataggcaggatgaacaccagcatctaacatcactaccttacctttatattctaatatatgacatgaacgcccaacttcattacctccacccaaacagtggaatttcaactgttcctcatctgaattcattatatagggagttgtatatatacagggggtttaggttttaatcaagaaatatttgaatatcaattctatatgttcttgatatctatagtggaagtcaaagaaagaaggaagtgttaggatatttgtatattgtaatgtttgaaagcatgaaaattactaccaatgatgataaaattagaaatgctaaaaattgaggattgtcaaaatttaattgacctcagtacattgaaggacaagaggtcaaggtttcggaacattgttcttataggcattacatatttacggggtaaacaccacatcttatcacatctacaaccaaatatagaataatgacggttgccgaaccacttgacttactaaaacaaaatttagatgaaaagatttttgtgaaactttcaggatatcgtgaaatggttggtaaattacatggatacgattctcattgtaacatcgtattgggcgatgcagtcgaaaccatttacagtctgacagaggaagaaggaaaacttacatctgaacaaaaaaatcatactcttgtttttattagaggtgattctgttatattagttactgatggtgaaaacttatagattttagtggacatcaaaaaaatcaagatcttagcttacgattttatccaaataaacacatttactaatagtttaatgaatatcgtatagaattctgtatattatctaaaaaaagttataaaaaacgaatctataaactacatggaatatcttcttctacttcttctaccaggtaaaaattgtttctttttggtattcatattccaatctgtaaatatttcagaaatcttctccgtaccatatttcaaaccaacttcataaatttcttcaaatctaccaaatgctaaagttgcatattcttctattggcggcctcaaatatgagcatccttcactattctttgcattttccaaagcattaacacttgcaacataagctaatctcatttgtatatcagccattgttggaacatttgcatgaacactgaaaggattcaatctattcactaaaacccaccaaccactcaatgagtttccatatttcattggactacgatcatcaacagaaccaacatcaacagctataatatgtttagcgcctcttctttgcatttctgaaactgttaaattatctatataaccaccgtccagtaacatattcccatcatcggtcaatggaggtaacaatgatgctaatgtcattgatgctctaatatatctccatgcatatccacttgtgtgaacctccataactgaatctgttaaattggttgaatttgtgtaatatttaatccagaagtcctcaattctggaatcaccaaacgctttccagattcctctattgaattcatgaccagttaagtatgatgttaatggaatcgttaaatccagtaatgatctccataacgatgacattctaccagcaaacgcctttgcacggacatagacagggacaaaatcataatcttttgcatataaacccccaacaaaggctcctatagatgtaccaccaatcatatcaactggaattccactatcttctaatgctttaataacaccaacatgactaatacctcttgcaccaccaccacctaaaactaaacctattgcttgcccagttaaaattcttgctaatctcataaaatcatctttatgttcctgtaatggttgatagtatttttgagatttaaaatcttgtttagtttgctttaaaaattgaaaaaaatcattattgttgacaatattttccatcttgaacatcaaattatcagttaatttcttaccaaatttagttaatgtatctgtatcataaacttttatattttcagtatgatctccatgagaatttttgcattccatttgaatatgatgatgtgcatgaacccaaattctatttttcaaccattgatgagttgagcctggttcaatatgtctatcagggtgtaataaaacaagttctgttctagaggttgtttttgttttaaccaatagtctttcaaattcgccaacatcaggtttcagcatactgtcggctagtaataaaatacaatcaccttgttgaatacacgtttgggtccaatttgaattaacaacagaatcacataaatatataacaatgtcatatttttcttctaattcagaaaaataaccactttgtttcagtttagcaagtttatcaaatgcatatttacccaaattacttaatgcggcactttgatttaatattttaacagatttaccaaccttttctaaggaatttgctaaattttcaccaaattcaactaatggaatcgtatcataagtaacaggcagtaatgtaattgttctataattattgaagctttgaatcattggttcatctttaattctagttgatgcagttgctgaaacatgtgattgtgaagctaccatagcaccatcatttttaactctattggcaacaattcttgaaatattgaccattattgaaggattacttaatgcaataatctcaaataatgtacgaggtattcttgcaagttcactatctctaattgaaacaactgtacttattcttttacttttagttaacacctctatttctcccattgattcaccttgaccatattcacccagtataacgtaattggtattatctttatttttagagagtgcacgaaatctaccatttaatacaatatagataccattggcagggtcagactgtttatataaaacatttccagccgaagaatgaacccattccaatgcataatcagttaaataaagttttttatccaatactttcaacaataactgtgcaatattcaactctaatctcggataacgttcagttaaatattcaaaaaattcacgtgaaagaaatgcaacatacgaatcagttgtagctgcaacgtcaacaaatgatttagatccaattaaagtacctaaataacctgcaatatcaccttccccaactgtgtataaatattcttcgaccatactatccttcaaagttctttcattttcaggatcatcgatataatttgtgttaaatgcgctttctcttttccaataactaacatcaaataagccatcaataacgtaaaatataccaggagtttgttctttttctttgataattttggtaccttttttaattttcataaatttaatatcatcagcaaattctcctttaacattatcaaaattaacaaatgatttataaacttttgaatttattgaacacgattcatctgagttcacattgtttgcggtaacactcccacttcgattattattatttgaattgttattgtgtaacaccgcagcatccatactggtcgttgaataagttctaagttttctgttttttgatgatgaagatggagcactttcacccacaggagtgacatatcttataccgggaacagaattactatgaagtgaaggagaattaactattgaatcaatattagaatttgatctaccattcagggattcaattgggaagttatttttatcaagtccaatcattgaagaaattctctcagctaatgcagcacgtagtgttgattcttcagtttcttcatcattatcatcagcactaaaagttctatcaataatttcattcaaatctgcctttgataaattatttctaaaattcacttctgagtttctaggtaaagcaacgttagaaagtaaatcaccaggatttgtatcagattttgaatcaagtacgaaatttcttgatttatttcttagaaatggaactcttttaattgaatttgtatttcttgattttttagtcgtattagtactattagtaagatttgaagtacttatactaacgttcgtacttgagttattggtatatggtgaattatcaagatctaaactaggagtgtcagttaaatacacactatcatcaccttctgaggtgaatacatccaaatgattagaatttgatgaataatatgaactttcagtattcaactttgaatttaaattatttaaggaagtattagagttacttaaatttgaataattagttgatttatatttgttagaattgaattttcttctaggttttaagttatatgaagattttttaattcttgaacttttggatgtttgattacctgtattactactattataatttgaacttgaagaatcactacgttcttgtctattaatataatcaattgctaaattatgtaaatatctaggtaattttctttcaaaagattttgtatgttgattcagattaatttcagtctgaaaaatattaggggttaaatctaagaaattatgagcagtttgaaatgtgactctgtacaatttagttaaaatcatttgaataatatgagatgtatcctttgggaattttgaagcaattctaacaaatgattccttagggattgttgaaattgtacaagaatttttgggtattgcaatcaattcaggcgaatttttcattttattacttataatattataattagaatcctttgattgaggactatcagcaaatgcagttggatctagggagaaattatcggaagggatcgaaggtaagttgtttttctgattgaaaaaattaggagttggcgttatacttgataaagtcctttgagaatctgttaaaatatttaaaacagcaataaatgaagacaatggagcaccacttttaattatatttaataattgatattttattccatcaacaataacaacattatgatcatcatttcttataaataggggattaatttgatttttgaaagaatcagtagcaggaccaattttagaataaacctgaatttcaccttcaacgcaaatagaaaaacccgagaattcatcaaggaaaattatttcacctgaatcaattttttgagtttgcaaggatttagttaattcatggaaaacaggagcatccaagtaaccaaagattttaattgcagataaaaattgatctaaataagatttcagttgaccggaatctgattcatttgttgaatttaggaaagtatctaaaattggattttgtcttttcgaatcttttggtagtcttgaataaacagttaaataagtataacggaaataagcatataagggagttgatatcaataaaataatatagaataaggaatttgcagagaatgtaatttcaaaagttttgaataatatcaagtaaataattttatgaatcatataagcagttgaatataacataaatgaaaagaatttaatcatcatccaaaatagaaaagatattggtttcaaagcatcgaatgtaaatgtagatgtatatgttgatattatatttgaatgagttgaatttattaatggttgaattgcaacattcgattcagtagaaattattgaagttgttgactctattaaagtttcaactgtttccgaaacagacattataaataatatagactaaaacttattagaattattgaattatagtaacgataggttaataattgagatttgaaaacaaaagagtgaaatactgtaaactttaaaatatactataaggggccatttcaacgaaataattaaacttgagtttatttacccaatggggcaactaacggaattcttaaagttagttcatcgatagtatgaaatgtttaagcacagcccattcatgatagataagtgcacgtttctagaagattcataatactatggtgataatagaatttcatttcatagacccatcgaccacgcggcttaacttttcagatgatttacatttagaatcgtcatgttaatctatttattatgatggaactgtagtctactagctggcttaaaagagaattttttaatctatataggaaagttgatatatacaggagtataatattataacagaagaaatgatttctatatgagatgagataaaaaaaataataagtaatcaaagttgatcctattattattaattttatcaatctcagattgaatgatatcttggaaaatgccttgtataaaactctaagtcggagtgaagtgataaatgtaatatgaataagggaaagaaagcgttaataagaaaggaaacaaatttattattttattgatttaacgagcttcaaattgaaccattctcttagttctagccttatataaaactctatgaccacattctttacatctaacaggttcttttggtgaaagggtaaaattaactgcacattgagcacaaacatatttaacaccataatttttaattgattgcataccactggcagcattacctaaattagctgcagttggtggaacaaaaccttctctagacattgtatattagttgttattaagttggtgatgaagattaaaaaaataaactaatcaactggtaatacataagtcatgataaaacttctacattactaagatgaattgcaccttgacaaaaatttttttttttcacaagacatgcatggcaaaaaaagcgaaaacacaacagtcccatcgacgcaaccatttttttcaaatgccaaaagacgcatcgacgcagccagatttttaaaattataatactattacgtaaccataaaaaatgttggttaggtttactcaacaataatttcaatttcactatggacaagtggctcatcgtattgtatttccagaaattcagctattttcaggtatttcaaactataccttaacttcattttaacgtaatttacatctaatttccaacactttttctttgttttctacaattcttttaaattacttggtgctcattatttaatatttgatatttggtatttcgtatttgatatttttattttaaacttttatttttctttcagttatcaaggttctttaattatattaagctccatcaatctctgttctatttttataaaacaagacaattcatttattttccattctttcaaataaatcaatcttttctttattacttaccacttttaaatattgaaaatttgaatcttattattaacattattattaattcattaattaacaaagcaattaaaatttatattaataatactacatacatttttttcaattgaatactacttaccacatctaaatattcaattaaaaaatatttcaaactctattatattcattttaaatcaattagataattgtaagtatacatcaaacatgactttatttcaaaccaatgatttcaattaattatcatatgcattcactctccatattcacatttaatcaaatgttacactcgttaaaatcttacgtaattatggatccatttgttaaaaattacatcttatcactccatgtgagacacaatttcgtgtcaagtacatttttttgaatttacgttggattctttaattacgtgaattttttaacagattaccatttttccgcatttgatttttcaattgatctcatcatctcatcatctctccaattttgaatatgaaatactaacattaacaacatttaacaaatcatatattatatagcatagaaaaaactatctcataataaatcaaaaaaaataaaacttaaaaaaatggcttcaattaatagacctttaagtttatcacatggttcattggaaactactatattaattccatcagattcatatttattctatcaacaacttacttcagatttcaaaaaaactttaccacaaccaactgaaggttttgctgatgataatgaaccttcttccaaatctgaattattaactaaatttttaggttatgttgttaactcaaactattcagacgctgaaaaatctcaagcaactaaattaatcttatcagattttgaaaatagatatttacaatcaactgatattcacactttcgcttctcaattattagcttctgaagaatatccaactacttcagaaaaaatcaactacaatgttgttaaaaactatttcgatgctaaagtttttgctaaatcagaaatttcaagttctaatgtttcatctgctttatttaatgccgctgctgatgaaaaagcactcatttatgctatctttggtggtcaaggtaataccgatgattattttgaagaattaagagaaatttaccaagtttataatggtttagtctctgatttcttatttaaagttcaacaaaaagttcaagatttaatctcctcaactcatgatattgatagaatttacactgatggttttgatttcattaactggttaaagaatccatctcaaaccccaagtgtcgataacttattatcaattccagtttcttgtcctttaatttgtgttattcaattgtgtcactatattattacttgtaaaactttaggtttaaccccaggtcaattcaaagcaaacttaaagggtactaccggtcactctcaaggtttagttacttcattagttgttgcatcctctgattcttgggaatcatttgaagttgaagctttgaaagcagttgaattattattctacttatctgttagatgtttacaagtttatccattaacctcacttgccccatcaatggttaaagatgctgaagaaaatggtgaaggtaaaccaggtccaatgttatctgttagagatttatcagttgctgaagttgaaacatttgttgaacaaactaaccatcatttaccatctgaaaaacatattaaaatttcacttattaatggtgctagaaatgttgttgtttcaggccctccagaatcattatatggttttaacttaaacttaagaaatgcaaaggctccatccggcttagaacaatcaagagttccatattctcaaagaagattaaaattctcttcaagattcttaccaattcattctcctttccattccaaattattagaatctgcaattccattgattttagaagatttcaaaaactcaggtttagaatttgaacaatctaaaatctcaattcctgtttatgatacttatgatggtaaagatttacgttcatactccggttcattagccgctagaattgttgaatgtattaacactttaactgttaactgggaattagcaactgactttaaggcaactcatttaattgattttggtccaggtggtgtctccggtttaggtgttttaactcataaaaacaaagaaggtactggtgctagaattatcgttgccggtgttttacaagccgcaaatgctgatgttgattacggttttaagcaagaattatttgatgttaatgaatcctcattaatctttgctcaagattggttaaacgaattcaaaccaaaattagttaaaaataaagatggtaaagtttatgttgatactaaattttcaagattattgtcaagagctccattaatggttccaggtatgactccaactactgtttctccatcatttgttgctgcaactcttaatgctggttataccattgaacttggaggtggtggttacttcaaagaagatactttaattgaagctttaactgaagttgctgaaaaagttaaaccaggttatggtattggtatcaatttactttatgttaacccaagaatgttacaatgggcaattccaatgattagaaacttaagacaaaagggtttccctcttcaatctcttacaattggtgctggtgttccatcattagaaattgcaggtgaatatattgaaactctcggtttaacttacttaggtttaaaaccaggttctattgatgctattggacaatgtatttctattgctaaggcatatcctcatttcccaattgttgttcaatggacaggtggtagaggtggtggtcaccattctttcgaagatttccatcaaccaattttacaaatgtattctaagattagaagatgttcaaatattattttagttgcaggttcaggtttcggttctgctgaagatacttatccatatttaactggtgaatggtcaaaatcatttaattatcctccaatgccatttgatggtttcttatttggctcaagagttatggcagctaaggaagctttaacttccgaaaaggcaaaggcattaattgcttcatgtcctggtgttccagataaccaatgggaacaaacttacaaaaagccaactggtggtattttaactgttaaatcagaaatgggtgaaccaattcataaaattgcaactagagctgttaaattctggaaagaaattgatgatactattttatcattaccaaagaacaaaatggttgaagctttagaaaagaagaaagattacattattggtaaattaaatgctgatttccaaaaaccttggtttggtaagaatgatgaaggtgtttgtgatgttaaggatatgacttatgaacaaatcgttgttagatgtgttgaattattatttatcaacagattaaatcaatggattgacccatcattaagagatttcactggtaaatttattagaagaatcgaagaaagatttgcaactactgcaactgtttccgttgttcaaagcttcactgaattaaacactccagctccagttttagatgtcctttttaagaagtatccacaggcaaagactcaattaattaatgctgaagatgttgatttctttattggtttatgtttaaacccattccaaaaaccagttccatttattccaatcttaaacgaaaaattcgaattcttcttcaagaaggattccttatggcaatctgaacatttagaagctgtcgttgatgaagatgttcaaagaacttgtgtcttatgtggtccagttgccgctcaattcattaacaaggttgatgaaccaatcaaggaaattatggatggtattcatgatggtcacattgaaaagttattaaaggaagaatataataatgatgcttcatctattccagttgttgaatacttcagttctaagtctgtttctaagccaaattctgttgctagtgtttctgttaccgaatctgctgatgctgttacttacacaattggttcaaaggttccaaatgctgatgaatggttctcattattagctggtaaaaaattcaactggagacacgcttttgttttatctgcactttttgttcaaggttacaatcatgttgctaacccagctaagaaagttttagcaccatctaagaatactgttgttactatttcaaacatgtctgatgaatccaagactgttatttcattatcccaaattattaagggtaaacaaagggaagttgttaatgtttcaatttctggtaacactatcaacttaaaattaattgaatcaagaactgctgatggttctcctgtttcattagaattattctacacttacaacactgctgatggttttgctccaattgctgaaattatggaaggtagaaatgaaagaatcaaggaattctactggaagctttggtttggttctaactcaaagattgacttagactttgatgttgcatctactattgatggtggctcaatggaaattaactccaaagatatctcccaattaactcattcagttggtaactcatgtgaatatttcgttccaagggaaggtagagatcaattagctccaatggattttgctattgttattggttggaaagcaatcatgaaggctatctttccaaaatgtgttgatggtgatatcttaaaattagttcatttatctaatgcttacagtttagttccaggtgctgatttattgaaggttggtgatcaggtttcttctgatgctgaaattgtttctgttatcaatggaccaactggtaaaaccgttgaagttgttggtacaatttacaaggattcaaaggctgttatgaaggttacttctgcattcttttacagaggtgaatattccgatttcgaaaacacctttgaaaaaactgaagaaactccagcacaagttattattgcttctgctaaggatgctgctgtcttaaaatcaaaagaatggttccatattgaagaaggtgttgaattattaaacaaaactttaattttcagattgaaatctgtttacaaatttaaatctgctaatgtttactctaatgttgaaactactggtaatgtttattacgaatctccaactaaagaaattaagaaggttgcagaaattgaatataatgctgctttctcttatggtaacccagttattgattacttaaccagaaatggtactccaattgaacagccattattatttgaaaacccaattccattagccgttgcattgaaaactaaagctccaactactaatgaaacctatgctgctgtttcaggtgattacaatccaattcacgttaacaaaatttttgctgcttatgctgacttaccaggtactattacccacggtatgtactcatctgcctctgtcagatcattggttgaaatgtatgctgctgatgctgttgcaccaagagttgttgcttacaaagccaatttcactggtatggttttaccaaatgatgagttaaccactagattagaacacattggtatgatcaatggtagaaagattattaagattgaaacaaagaagatctctactgatgaagttgttttagctggtgaagctgaaattgaacaaccagtctccacttttgtattcactggtcaaggttctcaggaacaaggtatgggtatggacttatacaactcatctgatgttgctaaagctgtctgggatagagctgatgttcacttagtcgctacttatggtttttccattttagatattgttaagaacaatccaaatgagttaaccgttcactttggtggtccaaagggtagagaaattagagaaaattatatctcaatgatgttcgaaactgttgccgaagatggttctttagtttctgaaaagattttcaaagaaattgatgaaaatacctccgaatatactttcagatctccatctggtttattagcagctactcaatttactcaacctgctttaactttaatggaaaaagctgcctttgaagatatgaaatctaagggtctggttccagctgaatccatgtttgctggtcactcattaggtgaatattcagcattatcttcactggctgatgttatgccaatcgaatcattagttgatgtcgttttctatagaggtatgactatgcaagttgcagttccaagagatgcattaggaagatctaattatggtatgtgtgctgttaacccatctagggttggtccaactttcactgatgctgctttaagatatgttgttgatcacatcagcaaacaaactggttggttattagaaattgtcaattacaatgttgaaaaccaacaatatgttacagctggtgatttaagggctcttgatactttaactaacactttgaatgttttcaaattacaaaagattgatattgttaagttacaagaaatgatgccattagaaaaagttgctgaacacttatctgagattgttgatgaagtttcaaagaaatcattagccaaaccacaaccaattgaacttgaaagaggttttgcatgtattccattaagaggtatctccgttcctttccattcttcttacttaaaatcaggtgtcactccattcaagagattcttagaaaagaaaatcccaatgtctgcggttaaaccagcttcattaatcggtaaatatattccaaacttgactgctaagccattcgaattaactaaagaatacttccaagatgtctacgatttaactggttccgaaaaaattaaggaaatcttaaacaactgggaaaaatatgaatctaaataatgattctatgtaatcaaatcttgtttaaagattttctttctttcattctaaaatgctttcaattctattttcacttcattttattttaaattcttttttttttcatttttcaaagttttctacatttataacatttttatttattctgtttgccatgttttgtggtaagaacattcaaatatgagtttttaaggtgtttagttagacctgtttatataaagttttttaagttatcaataataaattaattatttcaattatattttgtaatataatcgccttagattttgatttgtaaacgcgtcagcggtaaaatttacgtgacagcaaattaattgccaatattttcatgttgaataaattttagttcattatctataaaattagacagtttgaagagggtgttttgtgggatgcaaatatttttgataaaaaggtacagaccactaattttgaaagcaaacatcaacaaatatattttagcaccaaattcaacttctacattatatcaactaaatccactcaacatgagctcaaagtcaggacaatcaacattaatgagatttttttcaagtaaaaatgctccaattagtaaaaatgatgaaactactaagaaaagaccagtctcaagtttgagttcttctttggaagaagtaagagagaagagtgaagatccatcagaatcaccaaaagttaagaaaccgaaaactctggttgaaatagataatgatcttgaacaacacaaaaaggttaatgaaatcgaagaagcaaaaaaaatattgaagattgatgaaaagaatgcagcaaaacataaaacatctacgaacccaattatgtactcgatgttaacttctacatttgaagagcttgaaaacgaaagtggaagattgaagaacattgcttctgcatgtagattttttcatgaagttttacattttactgatttcagtgacattgaagataaaataagagatttaacaatggttacatacttgatggtcaatagactcggcccagattacgaaccaggtttagagttggggctaggtgaaacattacttttgaaagctttagcccaaggtaccggtcgtgaacttgcccaacttagaaaagattatcacgtagaaggtgatattggtgttgttgctcaaaaaagtaggtcgaaacaaaaggtcatgtttaagcctaaaagattaacagttcttgaagtctggaaaggacttaatgaaattgcaaagtttgaaggaacgaacgcacaaagtaaaaaagtcagtgttatcaacaaattgttaactgcttgtgaaggtgttgaagccaaatttttaatgaggtcattggaagggaaattaagaattaattttggtgaaaagagtgtcattgtagctttatccaaagcaattgttgagtggcaactagaacaaaaaaacaaaacggcaaactctgatttgattgtacaagctgaagatcaatttaaagaagcatactctagattaccaaattatgaaattttgattcaattgtctatgaaacatgggattttgaatttatgtgatcatgcagagttaagtccaagtgttcctttaaaacccatgttggctaaaccaactaaaagtatcagtgaaattctagatacattacagggtaaaagatttacatgtgaatataaatatgatggtgaaagggcacaacttcatctttcagaagatggaaaaatgttcatctattctagaaattcagaaaatatgactgaaagatatcccgatttgattcctgttgtgaatgcacttaaggctaaaaattctacgattaaaagtttgattcttgactgtgaatgtgttgcttgggatagtgtaaacaataaaatcttaccttttcaaattttatctactagaaagagaaaagatgttcaagaaaaggacattcaagttcaagtttgtttatttccatttgacattttattttacaatggcgaatctttgattcaaaaacctttagaggaaagaagaaaatatctttacaacaatttgaaagagataccaggaaaattacagtttgcaactaagatggatacagacaatgttgaaaaaattaccaaattcctagatgaatctgtcaatgatgcatgtgaaggtttgatgattaaaactttagacggaagtgattcttattatgaaccatctaaaagatcaagaaactggttgaaacttaaaaaagattatttagagggtgttggagattcacttgatttagtagtaattggtggttatataggtaaaggaaaacgtactggttggtatggtggttttttattagcaggttataaccaagatagtggagaatatgaaacaatttgtaaaattggaactggtttcagtgaagaacttttacaaaaattacacactcttcttaaaccaaccgaaataaaatcacctaagtcatcttatgtgtatgataaaaacaactcaaatgcggtacctgatgtatggtttgagccaactactttgtttgaagttaaggtcgctgatttgactacttcaccaatttacaagtgtggtgcaacttacttaggtgatggtgaaaaaggtgtctccttaagatttccaagatttatccagattagagatgataaatcaactgaagatgcgacaagtagtgaccaaattgtagaaatgtataatagtcaagcaaacttacaataattgacatttttgttaaattttatattaataaaccgatatagtagtgaaaatttaaatgtttaattgaaatattaaaataatacgatatagaagtacaaaatttaaaataaagtaactgtaaataaacctctagttgttcatagaatcttcaacaacaagtttggtgggttcaataatagggattttatcttcattctcatcactttctactggatcttcattctcatccaagtaactttccaactgtaaacgctgaagtgttggatttaaaaatttcttctttactgcagttcttggtttagtaactttggagccatcaatattttgaataccattactatctttattcttcaaaacagtatcttcattgctatctctgtgttcataacgatcgtttggtatctcaaaatttggtttatttgcagattgatactggattgcagacagcattccattattaaacccaataacaggagaaattccaacaccagaacctaaagcataattatcaacattatattccatacctaaattaccaggagtaaacaattgtccacctacaatgactctaccaaaattatttgacatagctgatggcatagataacatcatataatctggtttttgtgttgagttcattttatcactggtttcattatccttttctttaggttccatctctttcaactcagtagccgctttctggcctgcagattcattaatttccactgaatttacaccatttttattttccatggattcattgatattttcaacttctacagaatcattatgaaagagaatattatcctttgatgatgctgtaggcagtggcatataaacaggaatgtaacctgaagatggaaaattcataaagttcccacttaaagaaggagattgagatttaatatattggggcatcatttttagattttggtcatttccttgaaaattaaatccatctatagatccttgatggctttcattgtttcccactatcgtagtaggtgaattggtcataccagtatgttgtactggaagttgtatgagttgggatatactcccagattgtgattggctttgttgcaagttcaaagtagaagttggatcaattgcagagggaagacctgataaaatatacatttgttgattagagtacggttgatatgttgcggacagtaacgtgtgattaatagaaccatacgaaagagaatcactttgatcaaaaggttgtatattatcacccacaacatattgaatttgtgagcctttagaaggtgacattttaccatcatcaaaaatatatgattgactgaagcttagcttaccattaaaacgaactggattctcagaattgttataaccattcaaataatttggttcagcatcaataaaatctaaaggaaaatcgtccgtaatttgaatattattttgattggtattttgtaattgttctttggaatgttgtgttctaaccatatcatctccagcagagccaatatttacttgccgctgttgatcacgagttgctgaaatatttgagtatgattgctgtgggtacagtaactgagcgtgtggttgttgttgaggtaccacttgcggaatattatgattagattgggtaacatgctgctgttgttcaggtttgatagtctctggattagttgataaaatcggatttgttttcagcaataaatggctcacattaaatgataaaatagatgaaaaatgatcagaaagctgttctaaaataggtcttgattgatcatatttgaatgtgttgaacattccattgattggttttgttgtggctggttgattagataattctctttttaaatccctttctaagaaatcagtaaacaactttgtgtgaggaacactaaaccaaaagaacactttttgcttcttttgagttctgagacattgatttctgtgaagaaacttcaaaaatggcgatcttgagttttcaagtattgcatgagtaccacactttaaagctcttaaatcagaaaaaacaccttcttcaaattttttcctatcaacaatttcacgaccaatatggcacattttatatgcaatacaccggacaatatctgttcccgtaataaaatataagttattccagtagacacatgaaacaaaaccttcttctttgtttaagaaataacgtctaattacttgattttcatgccaattgactggggcagttgccaagaataaatcaagatcttttatcagctgaagggagttgataaatttttgtgattcttcttcagataaatcgttttcagtactattatcggaattctctatttgagaattattgttgtttattttagattcatcaaccttggggacttctgggataacttcacctagaattggcgtgtcagaatcttctaatggttcttttttgacactgccgttagcttctttgtattgttcagattttgcagttaaagcggtcatttgtgtatattttgtttatttatattttttcgtttagctattttttgatagggtctttaatagtttctttgattatatataataatgatatgaatatattagttaaacttacacaacagatttgatattgttaatcaggtgtagttttcaaagaaaaaatttgaacttaattgtttttattgtttgtttttattcaataacttaataaatgattgattccccaattttttttgatattcaatagtactggttcagagtgcttggcagctaatggatgtatataacagagaaaaagaaagtaacaatgtagtcaagaggccaaaggataattaaaagaaaaaagaaatatgtagttaatacagagtacagagaatgtatctagggatgaggccaaatgcggatgaggcacccacaagatctgctccaattttaccattgatagaaaattttaagtgcaaaaagcggaaaactggcttcagtgaggccctagaagagggttgttttatgacaagatgttttttgtttcacccgcgaaaaggtgtttcaaatcttgtttcatgtttcatgctcactatttggttgtggcaaaacgcaccccatgaaaaaaaacggggaagctcttggtataatccatggactacagggcggtaacaagcagtaacaaacaaagttgtatatattattatgattcgattaagaacaatagtatctatctattagtggttaaatatcgatatatagtgattttgaatatgaaggggattctgaaattaaagaattaccagtttcagaagataataataattcaccaaaatcaaataattatggtaaaataacagtaaaaaaattagttgttttaccaagatcatcagaagattctaatttccccatgttaagaaatgatcattcaagaaatggttcaagaacaagtattattctgaaaataactgtatatatatatatatattatatcagcttaacgtcttctacgtttaggcttaccgtccgagtttacattatctccttggcgtcctcttttaccactagcattgaaagaactgttactctcttctaattccttctttttagcttgtttttcctcttcgtatttctgttcttcctccttgacaatccatttccaatcattaaatttacgagtgtataattccatattccagtttttccataccatacgaccatatattgtacttttaacaacttcggaattttgaagtaacgtacgagcaatacgttctttgaacatattaagtttaaatgtaaacatccataaggcatcaataatatgagatgcagtagagttacatgctaactcaacaatattgcaacattcatgaccaattaatttattaagtaatgtctttctttcaactatgttaagtgattcacgtaatttaagtacattttcaattatatgagaaaagaccccatgtttacaaaacttgattaatgttgcttcatcaaattctaatattttagtaacggcaatatgtaagatcttctcttgatcgtattcaattaacttttcaaagaaaagagcccttcttctttcttctgatgttggccaatcatcctttgtactaaaaagagtagattcggataatttgagaatgttttcaaacaaatcattattgttatttcctttattgaaaaagtctatgaacttatcaataatactttctttcaaataattatcatttcttgctgaacaatcaattatggaaccgccaatatcaatattattaacaatcaattcattcataacaggaactaataaatctaaaatttccatttgttgggtactttttaactttgccatcatacattcaacaacatagacaccagtagtttctctctttgccaattttacaagtttttctttcatataagagttgtaaattctttcaacacttttaaccttttgattttcaattgagttttgtaggaaatgtgagcccacttgatcacttaataaatattcaacaaatgctccctccttttcacgttgcttgggatcagctgcttcattatcaccgttgaaaatactactccaaatggttctatctctatcaacaataccttctagttgaataaataattgaattactggtgacgtaaccttattaatggctaactctcttaaactttcacatgtctcatttttgttgaaaatctgtaatagcttacgaagttcatctttgaatgatgttggaacttgaaaattcttttgataatctttactgtccttgatttcaatcattttacgtgcaattttagattttttgcttcgaagaattgagttggattcggttgaagatggaagttccttacctgtcataacaagtaaagcaatacgtaaaacatgagtagcatatctatcattaatcatttgttttaagtgtggtagaaattcagaaataattttgatgaacatttcttccatactgatttcttcaaattcatcatcatcttcatcatcttcatcattttcgtcattcaagttgttgttgcttaacatttccttttcaataagagctgcacatctaactaaaaatgtttctaaaacatgggaactgaatttttgtcttgataagtcataaaaacgtccctcaaatgcatgatacaattgataaacttgtgcttgtgatgagttaagaactaatctttccattaatttagaacaaatttggttagtaaccaactttaattctttaccacgagcttcttcgaaaacactattaacaaaaagttcactttcttctggagtagaaaaagtattcaaatttaacgtttgttctgcttgatgaaaatatgtaagttcatttgaatcaactaaaccgaaaaaggcagttgatgatgaatcgattgattgatctttttgttctttatcttgaacatcttgataattttgatcaatatcttgattttcgtttttagaatcttcagatttctttacacgtctacctctaattttagccattgtgatataatattaattaaagatcaattaagtgtataattcacttaaaaataaataataagtataaaagtttaataaatttcaaattaatgcatgaaaaatttttgaaaaaatttatttaattgtagatcttaaaatattacgtaattttttaattgtccaaacaaaatattgctgatttccagtctctctgacctttacagcttaaattatatattcttactatcttttgtgtttctaataaccacggtcgcttctttccatacatatagtaatcatcttaattatggatattgatgaagatgatgcaattgtgaaaagtggagtcagaacgagggcaactaccagaaagagaaatagaagtcaaaaaatagttgcagatgacgaagacgaacaaattgagacaggtaaaccatcagcattaaaaggtgctggtggtggttatgcatgggaagatgaatatcgaaggtcatgggatattgtccaagaggatgcaagtggttcattggaaggtatagtttcagatttagttgatgcacgtaaaagacgtcgtgcaggtgcaacagtccctgttcaaagaggtattattagaacagttgttttgatattggattactcaggagtgatgcgtgaaaaggatgttagaccaacacgaggggtagctatgatagaacatgccgttgaatttgtgggagagttttttgatcaaaaccctgtttcacaagttgcaattgtggcaatgagaaatggtattgcacatattgttagtgaattgggaggtagtccacatgaacatataactgctttacgtcaattaagaacaagatttgatccggaaggtgaaccgagtctacaaaatgcattgaacatggctcgaggggttttggctggtggtaatgaaactgcaactcgtgaagttgttataatttttggtgctttattcagtgcagatcctggtaatattcataaaacaatttctgcgctagtaaaagaaagaataacggttcgtgtcattggattaacagcaagagttgcagtttgcgaggaactatgttccaaaacctcatttggtgacgtgaaaagtacgtatcatgttgccttagatgaaaatcattttaaagaattggttatggagtgtgtcacaccacttgctgttactaaaagagcagctgaaagtgcatctggtttttcattagttaaaatgggatttcccagtcgagctagtgcagaagtagggttatgcgcatgtcattcacaggcaatagcaggtggatatgtttgtccacaatgtggtagcaaggtctgtacactacccacagtatgtccttgttgttctttaactcttgttttatcaacacacttggctcgttcttatcatcatttatttccacttcaaacctttgatgattgtccagagggtggaatatgtttaggatgtggtgaagagtccggtgcaggtgctgccagatgccctcaatgtaaggagattttttgtgttgattgtgatgtatttttacatgaaacactacatacatgtgctggatgtgaaagtaaaactaaagacactattaccaaaaaaagttagctattgtttcatcttctcataataaatactatacataaactctgtgttacatatatcttaaaaaatttatagaatccactatattatatatctgacgactcacaaattttcatcaatctaggacagacttttgttaaccaagatagatctcattaacagctcacgcaatccgggcgttgtgaatacggaatttactcgtttattagtaccacttgaaaaaattgccattttccttacttgaaaagattctgaaagtagcaagattgtgttcttttggtaatatatatctgatatctacacccagtttgatctgaggtttatatccttatctatatctggcagttttagaattgtatgttcttttttacccactatatttatcaaagtcaaaaattttatataaaggttgatcaccgtaaaaccaatccaaaacaaaccggttaaaggtgattgaataattaaagatacactgttggcttaacaatcattatttacatggttttagatatatgtattcatcagtagatggggtttcaatttgtgaatcttatcgattttaagctggagaagaactctttttcgtcttatatatcttatgtaataccaagtcgaatttaagcctccggccaaaaatcatgaagcgacattttgataaaagcaattttaattaattaaaattatagtctgctatcagtgaaactctttagtggcgtttaactgctactttaatttatctaaattcaacctgttgaacaaattcaaatagatgaccacaaaggctgttttaagatccattaaaaacgttactagtgggtattcctcagcacaaattcttgtgcgtgagtgtacatccaatgaccctgctagtccaactatctcaaaaatgtctcaagtggctgacctcacttataaaaatggttcatttcaggatgtaatggatataattgatcgtcgtcttaatgataagggacgtaactggagacatgttgctaaagcacttactttactggagtatttagtacgttatggttcagatgacgttgttatttgggcaaaggataatctcttcattatcaaaacattaagagaatttaatactaaagatagtaccggaaatgatcaaggttcaattataagagtcaaggcaaaggaattgactagcttgctacaggatgatgaaagattgaaagaggaacgaatggcagcttctgcttctggttcaagaggacgtagaagaaagagaaacaatcgtaatccagaagatgatgaaatttacgatgatgatttgcaacgtgcattagaagaatctagaatgactgctgaagaagaagaattaagaagaagaaaccaatctgaccaatcacttgaaagagctattcagttaagtcttgaagaagaggaaatgagaaagaaaaatcaaaacttattagatttaaatgaatcagacccacctgatatttacggtttctacaatcaacaagcacaagctcaaaaccagggacaaattttaggttatgatatgtttggaaatcctgtttatgcaaatggatatcaagattttacaatgcaacaagcacaagcccaagcccaagcacaacaagcatatttacaacaacaactttaccaacaacaaatggcggcacacatggcagctcaagctcaagctcaagctcaagctcaagcgcaagcacaagttccattacaaactggttcaaacaatccttttgctcaacaacaacaacaacaacaatacttattacttcagcaacaagagaaagaagcagaagaggctagaaagagaagggaagaagaattacgtcaacaacaaaaacttctggaagaacagcagagattactacttgaacaacaacaaaaagttcaagcattgcaaaatgcatctcaaacgcctatgaaacaaaatgtaactggaagtcaaaagatgaatgaacaatatagcgaacttaatcaacttcttgctcaaggtacaggtcttgatacatttggtaatacgggagatgctagaatcccagcacaatttactaaaacaggtacatttattaactctcaaggtacaggttttaaacaaatatctaacaacaataatccatttattgataatcaatttactggtttcaatggaactgttggtgccaatgcgaatgctaatattaacagtaaaaatgttaactctaactctagctccagttctaaccccaatcgtattgttccttccgaaactggatacggatttggtaaccaacaataccaaaattcatacactcaaggaaatggtaacagtttgattgatttatgaaacgttttttttttttccaaaaaatcacttatcttctttccagatttaaaaactttacaatttttgtttaacactttatatactaactatttgatatactaaatcgtatatacactgtaaaacgtaatttttcttaagcataatatgtaaactacgtgagatttatttcctaaatatattatttattagataagaatacagtgtattctattctaatatatttacaaataatttgagaccatcattgtcatcgatgagtaactaataaattcattagaaagaggaaagtttagcgtgaaacctcttgaaagcagaatctttgatttcaaattagttattgaataaatgataaatctttttttctcatatagtagttcggaaaaacacgaaaaacggtcaaaattagtaactgatgttaaacaaatgttgttaaacacatccagtattttttctaaatatgcatacttccctctttcaaataatactattcaaaattgtccaagtattgtatatctccgacaaaaattgattgaaatctactaaggtgaaaactttaaacattcatatcaattttctatatttttaagaactaattacacggttgttttctacacgttgcatggttatatgtagcggtttaataaataaggaaaacttaaatcaaaaaaatataaattttaggattaccagtatataatgaaagccagaaaagagctgccaatttttgaatcggccaatctcggctaagttgcctgtttagggatgagagtcaagacaaagatgatgatgcaattattgccttaaagttttttttgtgtttttaatctaattaaaaggattaaagcagtgcctgttgtgaaggctcattctttcatcttctttttaagccttcttttcacaactgttaacgctatctccatagtttagtaacaataaaatatgtcgtaagttatcaaaatgaagcatttttatgcaaaacatatatgcaaatactaacaaatttttataattatatagtgacaatagaggaaattctcgtggtggtcgtggtggcggccgtggtggtagtagaggcggccgtggtgactcaggtggaggccgtggtggtggtcgtggtggtgccagaggaggccgcggtgattccggtggtagaggtggtggaagaggtggccgtggtggttctagaggtggtagaggtggatttggtggcggtgatgctcaagttattaaaccagagtataattttaaaccagaatatgaatctaaaattaccgaccttgatccattacctaaaattaaggcattgttagcagaagaacagaaaaatagaaaagatgatgatccatatcaaattgttagaagacctggttatggtacccttggtatcaaaactaagattggtacaaactatcttaaatttgaagttaaagggttgtcattttggtactataatgttaccttccaagacgaaattaatgcgaagaagaaggttaagaacgatttacttgaaatattattaactaaagccccatttaacggtttaaaaggtaaactttcccataatgggtctgatgcaatttattccactgcaccgttacctatcaagaaagaagatgaaaaagttcgttttgaattcgaaccagaagattatcaaggtgtcattccttcttctgttatgaccgtgttaaagggtaaaaaaactgaaaatccaaccatttattgtacagttgaattcatccacaaattaagtatggatgacttaaataactgggtcaagattcaagacaagaaaaatatcgaaccaaatgcttatatttccgctttaaatgttgttttaggttacaagatttccaaatgttcaaatgtttttatggcgggtaaatctaaatttttctttattgatcgtcctgaaaagtgtcaatcttttcaaagaggtttatttattgccaatggttattttgcttctgttttacctacctttgacaatgttatgattaatgttagaccagttgctggtgcatttattaaagctcataataaagatggtaccccaatgtctgttgccgatttaattgctgattactttgatgaaactgatttaaagaaagttccaaacggtgaaattttaggtcaaaaatggttctttaagggtataaagattcaaagaacttatttaggtcacaaatctaaacctaaaggtatttttgatattagtagatctgaaactgctaataactataaatttgattgtgatggtaaacagacttctgttgcacagtacttcaaggataaatataaattaactttaaaatatccagatgctccactgatccatttaggtggttccaattacgttcctatggaagcttgtatggttttaccaggtcaagaatttaaaggtgaaatatctgatgttagaggtgttttgagtttcagtacccatagacctcacgttattgctggtttggtccaacaagatggtatgaagaaattaaagcaatctattgaaaaagattctgctgatagaattggtaataaactagttgttgtcccatcaagagttcttccagcacctatcttagaatacaagaatactaaaatcacttttgttgaaaaacctgctgatggtaaatctgaaaaagctaaaggttcttgggatttaatcaataaacaattctatgatcctgtcaagggtgttaagaaattaaccgtcttagtcttggaaaattcaagaagaccattgagagataatgaaaaaactgatattgaagacgcatgtactgaatttgtcgctgaagttggtagacacggtgtcaaatttgataaaaacttcattatcaaaccagtttcttacgatagagttgaaaatttgaccagagatattgtcagtgtaatgaaaccattacaagctaagactgattatgttttaactattttgaaccaaaaggaaaaggctatttacgcaagtgttaagactgctttagatagagatttaggtattctgaatcaatgtactttacaaaacaaatttgctaagaagaagtttggtaaatttgatattcaaatgtatgcattgatgtccatgaagacttgtattaagttgggtggtgccaaccacgttttatctaagaatgatgccggtaagttaattgttgatggcttgcctgcattattacttggtgcggatgtcactcacccaactaacaattctaatggtacatccattgctgcagttgtgggttccattgatgataaattcaatagtttcccaggttctatttcagttcaagaacaaaagagagaaaccatcactgaaatgtctaagatgtgtgttgaaagaatcatggcttactataaatcagttggtaaattaccaaaatgtgttttattttatagagatggtgtttctttaggtcaatttgatattattttggatgaagaagtgactgcagtcaagaattcatttgcaaccatctcaaacaagttaggtgttaagtttaatcctaaattaactttcacaacaattttaaagagtcataatacaagattcttcccacttgaaaagaatgcaaagaatgcacaaggtaaagaagttgctgttcaagcacaagataacattttaccaggttcagttgttgaaaaaggtgttacatcaagaagtttatatgatttctttttacaatcacaacaagcattacaaggtactgcaattccaggtcattattatgtgttatatgatgaaaaccattggtcacctgatgatttgcaaaaagtcacatataatttatgtaatgtatttggtagagcaactaaatccgttagagttgttccaccagcatattatgcggatttgttatgtgaaagagcaacttgttttgttcataatgcacctgttggaagaaatcaaagtcctgttgatgctgcaaagaaagcactgggcgctggtattcacaagaacgttactgatagaatgatttacatttagctatgtgtatcattaatcaataacatattttttttcaatatttgatcttttcgttgttaactctattttatctgttttcccttttttgattatttatatctcatttctagttttcatagttatttaactgttatcttattgtgtacatgatagtacaaaacaccaacgacagaaaaatcactaatcaaacaatataaaatttgggttcaaagtacattattataaacaaataaaactatacacaaattcgttttactataaaaacgtttatttttttacattcttttttgaatggcaacaacatcatcaattttacttaatgctaattccaaaagttctttacgttgttgtaattcgatatggcgtttaactttaggatcttgtttggcataattttcaatttcttcagttgtcaagtttgagcttaatcttttctctaattctcttgggaaactgtagtaaaaatcacttaaaagctcaacatttaaaaacaagattgcagtttgtgttaatttttctgcaaccacatcaaggaaaatttcaggacatttaaacttattttctttatgtttacaacttgaactcttcaaacctttcaatctcatatttaaaacagacactctatccctcaaaaacaaagcttcacgagctcttaataacattccggggctaaaccccatattctctcgttcaatgttttgaccaactggattattttcattttcaatataggtcattaattgttttaatttatttcctccaattgtttttttaataaaatcataagcttcttgtgcttcctttacttcttcagttaataattgaacagaatgtgtcctactcacattccattctctatcttcaacttcgatttcatatttaaatggtttaatacaattttccacttggtcagctgttgagttatatctttggttaagaactgatattgcagcatctttaatagcctttttaatcatggtattattacgtaagttggtactatcaattaatacttcaatttcagtcaatatagcatctgtgataagagtagttgataatctaccaacaccaattttggttaaatttgctgttgctaaatcaagttttctatgccaaaaaacatcatcatttttggaactacttagattggcaattggtggttcctcgaattcataatcggcagaacctggatttttcgaaagataaggttcagatttgttccagtatcttagagctaataaatctaaaactttttgatctaattcacttcttaataaagatcttaattcaggtctcccaaatctttcaccaaattctttgatttccattttcaaattatcaatagtttgcgccatatatttttcacaagttaaatcacgatcattaaattcaactttgaatttataacttgtttcttctaattcattcataaccagttgatgcattggttttaaagcttctgacatagatctttccaaaactctgattaatttcctttttaacaactttgtaccaacattagttccgacaaaaacttctttattttctttaaaatatgctctttctgcattctgttgtgcaataaaagcttgaagaccagttttcttatgaaataatgatgtagattttggtatcttagtgattacaccaacatatcccatttttaaaggatattttttatttgttaaaattgaacgagcaacttccggttctactaaatctaatttagtaataataccgattgttctttcaccacgaggatctgcacgtcttgcagccctcaaagcagacgaatttgccatatcaacatcagctgcactaattgctaagattatatttggttggtcaagatatttatcacaaacttctctaattttattttttaaagttaaaggttgatctgctgcttcgacttgaatataaccaggtaaatcaaccaatgataagtcaggaacacgaggtgatttaatggttaattgaattggatcagcagaaacagcttcactttgaggaacagctaaatttaagtccaccaatactttttgaacttgttgaaaatctgtcatgttaaacattttcaaagctggaaattctgcaatttcagatgcacttgagggatcattcacaagggttaactctattggccttctagtaaccatatttgaaccttttggtaaaaattcttgaccaacaatactttctaaaacggacgatttacctgaactttgagaaccaataacaacaatcgaaggcagtcttaaatcagttgcaccattaatattaagtaaaatgtttctgatttcaatcatttgtcttgttaaattgagcatttgatcttctaaaacttctctttgtttattttcttcttcttcatcgacatcatcatcatcttcaagaagagcttcttcttcttctttttcttcatcatctaagttttgagagaatcctatagctgatgcggttgcagatccaacaatttcagtattattattatcaccattattgccattttcaccaccattattatcaccattaccaccaattccatcaaattgtgaaagaacagaatctaaaaatccacttacaccatcctttacatcacctgcaagttcttttgccttatctaattgttcagaagtataatttgaagcttcttcaactttatacattatataagaaccagcagcaactacaccaccacctaaatatacaggtattttagcagcatttgtaactgctttaccaatagtgaaaattgaaaattggcgtttattattattatgatgattataattaacaattacattatttgaaatacaacgtcgtgttgaaattctatgagcattagaattaattaatccatttgttgttaattttctaaattgtttaattgaagttttagcagagaataaaacagaaaatcgttgggaatgaagcccgttttgacctactgcatacctcagcattatcctttattgattatagcaggtagaataagaagtgatatatcaaaagagatctattagtaattatagagtgacgccaccaagaaacagggcaatttttacataattttttacaattttcatgtaaaatgtcttttaagacaccgccacatttgatatcctaatagtggcgcagtattttgttagatacatagattaaacacgtatgaatatatattattaatacataacagtggtaactgttatatcatgatttgctattgtttaacactctctcctatgacttctatatttggaaataaaacaatcccccatgataccagggagaggacaagtttccagaaatttccactatgtagagtgagatagagcgcaatatgacgttatcggtaaatcattgaaaaaataacttccaactccgtaaacctttccgtggactggttctgtgactgtacaagtatttaaagtataaaagatcaggtgtttcctcaaatttgtagtatactaattatatattctattttctattaaacacaacacatacaaatacaaaacaaattaataaaataacaaatatgtcatcacaaacaagagttttttacaaaggtaataaggaagactttttagtctttatcgatgatgttgatgaatacgaaaaatatgttcatggtgtatcttcaatcccattatctgcagttttagcaaattttgatgtttatagaagtattacaggtaatggttcaagtggtcaattagatattgcaagtaaacaaactctgaatgaagaatttggtgatttcaacagtgttgaagatgaaatcattccaaagattttgaaaaatggtcaacttcaaaacttaaggaaaaattccattcactaagttttacaattaacttatttatttacttatctatttatttactatatattatatatatcgccttaatgaataacgaacaattaaaacgttaacgtttactctttttattacgtatagtatttttccataatttactaactgtagcaaatctactagttgatgcatttgatgaaattgaatcaatatcattaccattaccattatcattgtcaaattgtgtttgatgtttcttaatatttatattatttaaacttggtgaatgttttaaactactaccacccaaactgctaccactattgaataaatttgtaaaacttttaatactactactatgtctaattattgatggtttagcaaaagttgaatcacctgtattattattattattatcattatcattattatttaaaaagctagaatttggacctacaatatcccttgatgatccccttttcaatgaactacccgttctttgtgatgatggtggtgatctattaaataatggattttgtgtacttattggtgtcgataacggtgttttcaaaagatcttcattcatatgagagttattaacatttcctgaactactagtcttgttattattagttggtttagtaattatacttttcattgatcttgagtttcttaatttaattggtgatcccagtgaatcactacctttattaacaaatgatggtgatggtggaacaaatgaattacttgatggtgttgatggggcatttaatgataataatgataattttgaatgaaatattagatttgaaaatgatctactaattgaattattcaatgtataaacttcaaattgtgatgaccaaataagtctgatacatgtttgagctgcaactctttcctgtaatgtaactttgattgtttgaaattcattatttgatgaaactaatgatgaaaatgatgaactatgtggtaatgaagctttttgtaaatcatttggttttattgaaattgttgaattatttctagaaatatatggttcatcaaatggtttatcactatcattggattcaaaatgatcaacatcaaaataatgaacttcattacttaaattgttcaatttttgattaaatttattaattggtgaaatttcatttggaacatatgatgaaacattaaacttttcaatctcatccacaaattcaagtgataaaattcttctttgaagatcagaatatattgaattggaagcattattaaaattatttgaaaaatgtaatttagatatattcatttttaaacaaccaaaccaaacaagtttttccttttcacttggaaatatcatacctaattcataaacattaaatctatcttcaaatttaaacgttaaaatatgttcataattagatgaaaaatttgaatcatggaaatccgtgtctaaattgaatattgacataagtggtattataaaaagtatatctaatgaattagaataaactgttgaacattttgaaaaaattaaatgtgatttgaataaactacaacaaacataatttgaatttaatatgtttgatttattattctttgattgactatgactatgactataatttgatcttgatttttgtttattagtaccagctaattgattagtatacacgattgcaaatgaacttgaaagttgtaaatcttgtaaattatccaaaaacagtttatttggtaacattagattatttgatttgttgaataaatttttaaattcatcaatcttagataattttaaatcattattaccaacgtaactattaatttcatcaattttagaattaattttctttacagtttgttcataatatgataattgtaatttatttttttcatcaagttcaatatttttcaataatgattgtaatattaatttataccttaccattctattagttggcatttgaacaactgatataaatcttgtatctaaatgtttatctaaaaacatattatcattaatattcttatattcaactaggtaatcatttaatattattagtgaatctctcttatatttttcaatatcatttaaacccgaaaattttaaaactctatgatataatgcacaataagtggaatataaatcaacatcaattgaatcatttgatataagttttattatagtttctaagtacactttttcatttgaaacatagttaaatttattaaaatctggcgattttgcatttaatttaattttatcctttatatttatattatcaattggatcatctttaatatttaaagattcttcatgccatttattataaacttcaagcaaattatcataaaaagcttgattattttttaaaagtttagaaactgaatttttgaattcagtaaaatatattggagttagggtatctgacataaaattttttaaataaactttttctaaaatcttaagggaaaagatatagacatgttctgtattaattaattcacttgtttgctttaatcttgtaaatgaacgcttcaaaattgctgcatcaacatctgaattttgtaagattttagaaactggagtatctaaattagagaaatttttagaggaaacaattgaatttgatgtaatagtttgttgatttgttgatgatgtatttataggactgtataatgatagtttcaaatctgagaaatctagataattttgaatatttaagtcgagatcaaggtcaagatcaattggatagtctaagttgtctatactatcaatattatcagaattatcagatactttcctaatatgagttatctgagattcattaatattcaaattatctataatatcactattatcattatcattattattgttattattattattattattattattattattattattattattattattattattattattattattgttattattattgttattcatattattattactagtattattttcactaaatgatattgggggatcaagcatcatttcatcattttcaaatgaacaaatagttgaatcatttattgtcagttgagagaaatcagataaatgtattgaaacagtatttctatttgtatttaaaggtaatacaggagattttgaatgaatagattgattttgagctaattcagagacatccgggcaatatgagaccattatgaagacgttgacttttcactctgggtagaaatttaacgggatatatgaattatttgggaaaagatgtgaagtgaaagtgttgatatattataatttctattgattgtattgataaatagataatttctattaaaataaacaagatcaaagggtatatactctacttgactaataaattatttatgtaaggtaccttgtgatgatattatactttaataaaaaaattgcaaaatggatgcgatgtttaaattgatgccaacggtgtaaatcgataacgggattgatgctctttataaatttaatatattcaaatttgataaacctttacctattaacttcaataaacacgaacacgttgaatatttaatgaatcaatagtaatcaagcaagtaaaagaaagcaatcaatagtaattaggggaattaatttaaaaaaatagtcaaatattcagacgagcctcaaagtcccgtttccttattatactaaatcatcccgctatatataaacgaatacaaatttatacaaggtcttcactcctttcttatatatttttaccaagctttgtatcagagttacaaaatcaccttatctattacactattagatttacttttataacttacatttatgatatatcactattgtatgttgaaaaaaatcgtgttttattgtcatttttcaactattgatctctgatgtgtcaaatatgtcagggctcggtcccaccctttctctgtggtggtgaaaaagacagcttgttccaaatttccgaattgatggaccttttcactccaaatttccgagtagtttctatattgaattttactatttgctgtcattacatgagatttttggtttcattggatcttataatgatgaactgatatttcattaatatttcattaatatttcattgatatttcaacttagaactatatatactcactccggatcaatgctctcattattttctagagtttcatcaattgcatcaccttccatcgtttcattacgttatttctctgcctctccatctgtttgggctaaaaaggataaaaaaggttcttcaaagaaagataatggtaaaaaatcatcttcaaatacaccagttgaagatgatgaagttgaaattttagatccaaagaaaatattaactgaagttaaacaacaatgtgatgaatcttttaaactttattcaaaatctttaactgaacttaaaatgggtaaggcaaacccttcattatttgataacttaaagattaaaattgatgattcttatactgctacatttcctgaaattgctatgagtgcaatgaaaggttccggatttttaaatattaatgtttttgatcctgctcattctaaaaaagtggtatctgcaattctagaggccaatatgaatctaaatcctgaaattgatccaaaaaatcctcaacttttaaaaattaaattaccaaattcaacaaaggaattaagagagaagcaaataaaggatatgaaagctttattagatcaatataaatcaaatacaagttttaaaaatagtttaccttttattagatcaaatgtattgaaaaatttaaagaaagttgatggttcaaaagatattattaagaaattaactactgatatagatgcaacttacaaatcatatgttgaaaagtttacaaactcgtttaaaactaccgaaaaatctttaaactaaacagattttagtttattttcttgtaaataatatatcctatcaatgttttatactttttaatttttttaattttgatctaaagttctatctatttatctatttatttaattagagtttctagctaatttatacagccctttaattctttgaaataagctataatcatatgctgctttattcattgatgaaacaaatgtccatgcctttttaccatctttaattggataatcaattacatttggtatacttgtactaataaatttacttttatcaaagcaaacactcttttcattacataaacctcttaaaccttcttcaccaccaaatttaccataccctgaacctttaatacctccaaatggtaattgacaaacatagaaagttgcaaaatcattaattgcaacattacctgtcttaaattcacttgccattttaaaacctttctctctatttgttgtaaaaattgaaccacctaaaccaaattctgaattatttgcaatttctaaaccttcttcatcattttcagcataaataacacttaaaattggtccaaaaatttcattttgtgcaattttacttttcggatttaaatcactaatcaaagtaggtttaaaataatgtccctgtggatagtttggatgggtaaatctacttcctccagaaataactttaccctcaccattttcttcaacttcctttatccaattctccatttcatcaaattttgaaccacccattatcattgcacccatgtctatttcctcaacttgatcaatatcactacctaagtgaaacataccaatcttttcctttaatttatttattaatgattcatagttatttctatcaccacatacaataactctttcaataccaatacaattctgtcctgcactttgaaatgtaccacgcaaaagaacacttgcaattccatcaatacccttttgtttcatgtaatcatcgcatataataactgcatccttacctcctaattctgtaacaacaggtgttaaaacttcacttgccttagcaacaacttgttttgcaattggcctcgatccaatgaatgttatatgatttaatctcggattacaactaacagtatctgcatctttaccccaacaacaaacaagttggactaaatcttcatcaatttcacaaatttttaatgtgcttttcacaatatgcataaaaaattcactactccatctgaccctttcactacatttaataataacaccattaccactaaagacacctgcaattattggtcccattaaattatgaaatggataattccatgaaacaattgctgcaacaactcctaatggttcataccaaacttgggcatttttatatctcattaacatattggatggtccaggtcttgtacttggtttcaaaactgaatctccatgttttaatatccaattaattttctctaatgtaaccataatttcacccattgatgcatcaaccattgtcttaccagaatctctacatgcaactcttgcaatttccttttgattcttgattataaattcacttaatgtacgtaaaaactttcttctcttatattcaaaatttttatctttataaaacactggttgagctaattgtgactttttaataattaaatcaatttcctctggtgtatgtgatttatacttacctaaatattgtgatgttgcaggacaataacaataaatataatctggatcgtcaggttgatatatatcaggtattgttaatcttttacctttccaatttggttgtgaagcttctgggaattcaatatcaaatttcattggcttttcagttctttttcttgttttacggaatataaatagtaaaattgtaattgaaataactagtaatgaaattgaaatctgaacaggtcttgtattattttcattaaattgcatttgtaattgattaagttgaaatatctgattagctgaaggcatattattaatggtttgattcaattgaagtattatttcagttaaattcaatgtcattaattcagacattttattctattggtataattttttatcggttattataaacaattattgataaccttacaccaagctctttaaaatgaatcaatgcaatttaacaacatgaaaattcgtatattaattgttgttattcctaacatccaggtgtcaaagtgaaaaaaatgttgagataattattaggtaatcaaattttatacgatgaattgattgcatgtgcaaacatcgaaccattatgtcgtatataagagtggtatgtaggatagatacattagttgataatattttaatattaaaacctttaaaagggtatactttacatagctgtatattaattattaaataaaatttgttttaattagtaaaagttgatattgttataaagcagctattataactgtgattattacgtatattatctgatgatcttgaaagaaataaaccattctattcctcttcactcatatcttcttcatcttcaatgtcatcaaaaacatcatcaaataccttatctagttcctcatctatttcagtatcattggtttctactgtcttggtatttgatttttccttttcagttgaatgttccttaatttttccattatctacattttgttttgtagatttcttagtagttttgacaactgtttttgtattagatttcttttgaatttcttgttgcttctcaagctctttttgtttttgtcttaattgtttctcaaactctattgtttcctctctttctttttcacgtctggcttgcatctccttttcattttctctttttgattttaatggatcatcctcaatgattagttggaaatcactgtcattattttcctctactacaaagttatcaacagcatccgtatcatcccaatcagaaaactcaagttcctcttcttcttctttattcttttttaatatttccccattactcaccaacgcttcatttgcttcaccacttgttgtagactttttaggaggaaactttactgtacgatcaccatcgtccaattcatctcttttatcgttagctgcctctaattcagattccaattcttctgcaaaattttctaaatcttcatcactcataatttgttccttttgaacgaccggttttggtttattcgttaacaattgttcccgtgatgctttttttggtatctttgaaataatcttctcttttttaggtaacgattgattgattttttcaacaactgttttttgagaaggttgtgttggtggtgctataaacagttcaaatgaagcttgatctggtcttgcttctttaacttcacgttcccgtatcatatttttatgagcttcaggcctaggtttgggtacatcatcaatatatgtcttactcttgatcggtgacgcttcctttgttttcggtttgtatattcttccattgttgtttataccaactgctctttcagctttccttaaaagtaaactcttttgttgtttccgagcacccataccaccattatgatgaggtgaatttgcaatttttggtgtcgtaggcgcagattgtgttgtttgtgtaatttttggtgtataattaacaggcgatttgggatgatttgaagttagtggtgaatttggttttgatagaaatactggtttttgtagtttattcaccattggtgatggtgaagcagacgattgagctacttttgatttccttatcggtgataatttatttaaaactgattcatagttattcaagttatttggcaattgtggtatcttatttattttagtatttggtgtactattattattgtttttgctgttcaaaatcgatcctaataaataatcaacaattttcagatcttcgggttttttatcatttattgtattacgagcacgatgtttgtatgtatgttcaagttttgatattttattaataactgattctgaatctcttgatttattgattttaataaacccgtcaaatccatctattttaaatgttctactaatttcatcaaatgataataaaaattcattataattatttgaagctgaaatagtattatttagtgtaggctttttataccgtccttcaaagtacatacgatcatcttctttatgagtcgtagtaatcgctttttcattggcctttgtctccatgaacaaataacaactttcaaaatcattcgaactaccaacttcaatttctgcatttgaactttctcgatacatcattgatctgtaagaattatccacagtattaggaagaaatccatatcgcaaaccaaaaacatccgtttgtaatcctgaaaatagtccagacatgtccaattcatactcaccatctggtacctctttactcatcgtggattcttgcgtatctttgataagaaaagaagaatgtattccaaaaataggacgacttcttaacttaatgctttaaccccggaggctgtcaaaaagtcactgggaaaaatcttggaacgcttacttcatccttaataagtaattttaagaaaagtttacgatgaaatttaagattatatactgtggaactatggggtttgatttatgttttacattaccgctggtctttaaatgttttcagaaaggatcttcttttaattatcaatggttttagatatacaaattttaaaactgtttagtaaataattgtaatgggtcaaaaattatggagatcactgatgaaaaatcatgttaattttcatcaaatatatcgataccgtagttttatataccaagatcaattacgtagagctctaagtctttctttaagacgatcttcctctggtgatgttacagttgcttcactttcatttactggactaccaagacctgaaacttttgcctcaccaattttatgtttcatctctattcctgcttcatcagccatctgttgcattaaaagatcaacttcaccttgaggttgggtactaacactcatttgatttgatacattttcatagtaatttgttgaactttctaaatcttcgaattgttcctcgaaaacatccataactttagtaatttgttctaaattcataccttccattgctttatccatacctttgacaacatatgtcatatttttagtaactgtacgcattgttacagcagtttgaatacgtgatgcaactgcatcaatacgtgatgataatcttaaaaggttaatacgttcctgtgattttctaattgcattttgtgcatatatttgtgcaatatcattgtttccttgtgataatgcctttttaacttttttcttttcagcttcttcttccttacttgcctttgcagcttgtctatttagttgttttgatgtaaattttaattgaaaaagtgaatctatgttatcaagggaatattcgagatgttagtaaataatgtttttcaagatatacgattataagatacttactttctagtcctgacatatcgattaactatgcggaagagagatacaattgatgatatatagtgtaaaggtgtaagttacaattgcagattaatatcgaaattgataagagaccaaaactatataatttctacttttctattacgtaatttttaaacatgcatctctttctacaataacagttatatacagtgcttatacaacttaatctatcagttatcacattatatatcgttgatcatttcttgttcgtaagtccttcgatacggctcacttctttattaaaattttctaaattttcgtattgtggtttcccatcaataaatcttacaactcccaaattatcaccagtttttggttcaggttttctaaattgttcttcatttttaatcacattttctaacattgaaacattatcttttgtcctcttgctaataaagtctttagcattgacaacaaaattgtcacttccacttcctgtttgaatcaaaacagttcttgggcccttgacaacaacgtaattaccacttcccataacataatctgtaagttcagattgtccggttttgagcatactccatgctttcgatgtaatattctttaaatatgacaatgttttatcaatataaacgttatttgtaaccttaatttctgaagattctattttattttcaacattatcagttatcttatggaataaaccatccatgctattccacttttcagcagtaatattattaccgctggaaagttccgataagtcactcacagtaaccgcaaatatattatttctatcaactctgatttcttcgttggaacctaatccaactttgaaaacgctacctttaccaaccacagcggctataccacgtccattcagccaagtatatcctctacctttaaatccataatgcaattgattcggaagattcttaacgctcacgttgagtgaattacctacataacattgtaatgaatttggatcaaataaaatccaatcagcactaccatctaatgttaaactcacaaaacttttcgttgatgatgatttactatttttatctgaatcatatgcactaacaagtaattgtaatggaactgtactaataacactttgatatcttgatgcataacctgataataaaatctggcgtaatggctgaataactttccaattactttttataaattgttcagtacctttacccttagatttattttcaaatgagtaaacacttataactgaaccttttttcacatttacaggaacagaaggtggtagagtaactgataaagaagatgctggtgttccaatggttttaaatactggtgcattgatggtatctagtgttccatgttccacagctggtaatgtatctgctttaacaaggcctactttattatctagtgaaaccggttctgttgtaaccgtagtattcggttgttgtatagtaatgaatcgcacacctcttagatttgagagtttcaaactcgttttagagaacattgtgtgattattttgtgtggtgaatcaatattggttaacaattgactggatataaggattaggaattgaaattacatcaacttttttctttgagtgagattaaaatatatcaccaaatcaaattactagtataagtttatttaatcgttacacaaattcatcaattcagtttcattcaaaacctttgcattatgataattgcttagatctataaactgttcaacgtctataacaatgtaatcaatattatttgaatcatactgattatccaccaatataccaccacgaagttcgatctctatttccaatacctcacgcctcacgttggtgctattttcgaatcctaaaagcataaatatcttattgtaaaacttcatacccagttttatcatttcttcttgatttgaaaccaaagtatatttatcatttggatatttctctaaatatttatcagctacattccataatgttttgtaatcatactcaactgtattattcaaatcaaactgatttatattttcttgacattctgataaaaaatcatcgtcgacagataaacaatgactaggatctggtttaactaattgaccagttcgtatacaatcttcacaccatttaaacttaaaaatattgtagttttttttcagctcactgactgagagtgtgtatttatctgctaaaattataatacggtcaccatgatgatattgtaatggattcgtagtaactttacctccatgcgattcaattataccatttatttcactcgtttcaaccaacactccatcattataacaatcagtctttacacagaatgtaaagttttcaaataaagtgtcttttttggcaaatgttttgataaaatttttattaacattactcaattgcaattgtttcttggttttcattttacgtttatttttcttgttatcatcaaattcaccagatatatgatttctttttttttcatgtagtttttcatagtaacaattgattgtatcacactcattatattctttatcatgtctaactttagtacaatatggatgtcttaaagttgatttaagaacaaaacggttgggtatatcagctcttgcattgacaaaatttctagctttaatagtgattacaatgctgttatgtggataaatccaataatctggttttaaagatccaaatttgactctatgctcatgtaaatcaatatcagattcaaactttttataaggaatccaagaccctgatgttttctcgttaattgcattcgttatttcagtatgaaaaccaaaacgtataaggcaaaaactaacaaaccaatgtcgataactatcagtcatatctcccgtatatttgatactttcattaccatctccaccatataatgcacacaaataattcgatcctaatttcccaataatagtgacatccaaatcattaacaaattcttccaagtaaaatggtttaattttaatccatttattagaagtttcacctaccaaatacacagaatcccaatgctttacaactaatccttcactgtgtttctttatgatattctccatagcaactttaatatcttctgcattgtaaccaatgttccatttatgtaatttaataaatttaaaactatcttcttccattttactcaaagcacgagcaagtatctctttccgttttatcaacggcgttacttgcagagtttcaccattataatatagcacatcaaaacataataagcaattgtataagccaatattttcattatctgtgtcaattgaatttaattgtctatacaacttttcagagcacctcttcacatcttggaaccctagtatcattcctgttgattcactcatagtaaccatttcaccatctaatattatactatcaatgccatcaaaatattcctctttcaaatatcgagtgataatgccattattatcaccaacaaatgaaccataccatggttggatgattctatttctagaataaaactttgtcatgattttgccattttcgtttctgtaaatatgagcacaagatctttcaccgtctaatttttcttcaacacagaaaccttcagtttcttgtctaatattattcttaaaaatacttactttatcgacaacactttcaaaatttccattattacgggtacatctcataatagaaaaaggtacaccaagcaaaatttcaacaactatcaaaattttagttgaattggacttatcatttctttttaatttgttatttgatgaatcaataagttttttccatatatgaacatcatgatttttcaaatattctacaccatatacgacatcccaaagatctgatcttgatttccaaattgctgatgctaaacctttaggtttcatacaaagtgcattgaagacacaagtttctgttataattgttctatttaaaatacaagaaaaaactaaatgcattgattcgttagttttatttgaattaacggatgaattagaagcgttaataacatatatcatatcaaatatggcttcaacaatcggatataagttatctagtttttgtggctgcatcgtttgtacaaataatttatcaaaaagtgaacttacattatgtaatgtaatctgtccattatatttatgatgtacttctagtaatctttggaaataagtattttgtaataaagtccattcttcccattgaagttttaaaattgattgaatgtcattcatatattttaatgtcggagattcattatttttaccaatttcaattgaatcaattgcggatctaattataccagatttaatagattctgtatttgtgtatctatataaacatttaacaagttgatattttgataataataaacctctagatctatgtggaagtaaaaattgtaataattgatatttatctatatctgagtgaagtagaaaaaagatacttgatataattgaagttttattttgtgaaactgttgatgatgagttaagtcttgaggatatggctgatataggtaatgatttctgtgaaatgaaatcatcatcatcatcaattgattcaagtactgaatgaaatgaaggggtaggtggtaaacataaacggatacatgagttctctgttgtcatcaaagctgaacctgtaggagaagagtgaacaagtggtaatatttcaagagaaactcgaataggttatatgatattttgaaaatttcatgtaaagaatttttccaatcttgcttttaagattaaagtacatgtattaaatggaaatattagaactacaactatattattatatatatatatatataatatttatatttacatgattataagtaaggacaaatgatattttttgaatgattagttaaatttttgaattctaaaatattattgtattcgggaatgtattgtgacatataagtaaatgagaatgtgaatgcagctatttgtgtgtcaagtaatgttggattttcattatcattccagtacttacttttagagaaagattcatttaaatctaataaagttttcaaagctttatttttaattgttttcatttcctcatctgctgctattttagttttcttagaagataagaaagatgtgaaatactggaatgaagattcatttcttacattaaaatcattcctttgtagtaaatataatttgagttgagtatttatcattgacgtgactggtttgattgattttatagatgcagggagtgtataatctgaagttgaataatatttttctaaaattgaatcatccaatgataataaagatatagtgtaataatcgaataaaatatcattaatataattaaaaatagtttgatcgtataatgataattttgatgaatttaacgaatttagtaaattggaatgatatatattacgttttatatgatgaatttttttatcctttgaatcttctataattataggtaattgattatcggatgatgccgaatatgataaaattgatatagaagaaaattcatctattgtcttattggaagataatgatgccgataatttagttatatcattttccactgatgggaatttgagtattttgtcatttttcatcactactaaaagagccataagacagagtggatcagttggtatcaaataattatcattctcagggtgtttagaaagtgaatatacacctaaattgtatacattctctgaatgtccatcactatgagaagaattcagataaaactgacgaccaggataagtttccacgagtacttctgtaggatactctatacgaggaaatgattgatgatacgatagcattgtatactaaagacccagtaataacaactcaacattgaagttagtaataaagcatgctaaattcatgctatataggcaacttttcataataaaacttacgtaatgacttgctggttttaaatcaaatcccttcccctaatagaatctcgcaatcttcttttgaaacattgttaaatgatcttgtgattgatctcccgtgatctagatttaattatgattagtgatattgtaattaatattctcattgattttttactatctaactattgcaatcaatatacttcataccctctcaactatatcatctaaaaggtgcttcttattaaatacccctatcaagaatgctttaccaaattactgatgaattatcagacttgccccattaccataatcttgaagtggaggaccctccggaatactcggcttcagttcatcatttgtctatagtgtactacaccgatgaaactgaacaaatgagagcaatacatatgggtagatcttttaaagctgctagttttacacccttattacttgaaatcaattctacacaagttaatttatttcatataaagggcaattataatagatacattgcatataattttaatgaactaaatccatcatttgttgacccaaatctaaatattaaatcaaaatcatcctctaaattaaattttataggtcaaggtattggttcttctaagaatttatttagcattgcagatttgaatttgacatcaacatcactatctttttcatcagtatcaaatagacaaaataataccccaaattcatcatttctggatctgtcaacaaattcagattgtagaattattcagccaagacatgcactgatttcaaataattccaattcttccctttcaacaatgttttctcaatcaaatacctcaactatgtccaattcaacattttcacctactacaccatcactttcaagagaaagttcatcttctttttcaaaactttttgataaactgtcatttaggaaatacacttcatcagataaaaaaactgataatgatttcttttctcctagcaaaggtaaacaatttttacctgattattcaaatattaatctctctgattctgataaattctctcaagacatgttatatattcaaaagcttttaaacaataagccggacattaatcaaattttagatacagattatacagctcaagatgctcaacttttaaatttgaaatcaaaattatttaaatcattttccttacaggagttagttaaatttggtaacgcagcagatttaccatcaaaaccatttgcactacgtatgatacttccaagtgaacaatttgttttggtttcttataatgcaaatgtttattcatcaattttctataaactcaatattgctaaagagttgagtttggatttagatttgagagttcctttacctttggattattgtgttccaagaagaaatcgtcgtcgtggtacgagacagagaagtaatactaataatactagaacatccaatagaaacagatcagattccgattctacatcaagaataaggtcaacttctacaacttcaataaattcaaatattcaaccaaaatcattaacaacaggaacagttacaacacgttctcgtagtggatctttattgaataataatgatgatggtgatgatgacgaatttgatacaactttcaatattgacgataattctgtttcatttcaacctcagccttcaattcaaccacaagttatttttgaggatgagattctaaatgatatcattcaattagacccagctgaacaaacaatatcatcagtttcaaatatatctaggtcaacatcatattctgttttttcatctgttgaaagatattcatcacaaattacagatgcaactattttatcaaactcattatcaccaataacatcacaagatgaaaatgataattttattacaactgaattgaatttgtctgataagacacctatttttttcgaagatgagagtcatttcaaatataaggagttggtatttgcagtcaaatgtattaaatcttgtaaaaacaaaacaataccatggtgtaattaatgattttaattatgttgctttcgatgtttgatcattgttttatgatatgtgtttttgtgttatatttgttcatgtgttagattggtacaatttacgttttacctaaatgggttggttattgcattttattttcattttattttattttactttactttactttattttactttattttactttattttattttaccatattttcttttatattattttatttttcatccttttgctatgagcttatttatgttattatcacacttgtgtggtgtattgttgttttactactgttactttatatgttatttaactatattccaaaatgtattattgttaaacttgacgaaacttacaccaattttcataaagagatgtatttaaatcatttacttcaagttcttcaagttttgtgtaaatttgcaaaatattacctttatgttcatttttcattcgatcaacaccaaaatcggtttcaactaatgcacaatctcttattatatgaagaagttctttcaataataaccacctcttggaatccttttcaaatttcaaattcacaaattcacttattccaaaccatactttaacattagataatttcatcaacattttagcattatcaatactcccactatatgaatgcattgccatattaacaactttatcaggttgtttttctttaatcaaaccatcgaatttttttaaacattcatacattgttccttgagcaccaacacaatgcattgatgttgacaattttttcctattaactgaaataatcagatttaactgtcttttaaatatttttaattgatggctcattttaattctataattggaaagtcccgagatactagaagaattacctaagtatccagaattgggtattcttgcaactttatcaataccgatttctccaatattaacattattattactttttaatttatcttccattatttctattatatcatctaaattttcaggaatgggcagttgttcaatcaatttgtcgatttcatcagatgcatttttcgaatgcttttctaaaattgaaaaatagtgtcgtttcttgaattcaatttctggttcattaatattccttttctcgttagtgtatagatgagtaaaccatggatggattcctacattaagtagtacatttttattatttcttatagtttcttcatccattaagttgaatatgagctctctatcaatatgatttgtcatcattaaattaattggccactccttattaccaagtgattttttcagctcatcgtattcatttattgtaacatctggtgataaatgacaatgagagtcatataaacgtatctgatccatgtttatcggccaaagatatatagtcgtatataagtaagaacgttgaaactataaaatcattacgttatacattttacatctcacgcaagacgtgtcacagttaaaatagattgaatctacgatcaagtttatttcatctctgagattcagataacattaatacaattcataatttgaaatatttctaaaactttatttgccttacaagttcatcaagtaccttatcagacggcatcactttcctttttttagatggaactttagcttcattttcaacaatgctggaattgtcttcgctcattctaatgaactgaactactgccttatttgatttactatcaaattccgatttcatgtattcatcaattttggcagtattagtattccctaaaaatctatcatatctcctttttttctcttctttctgtctcctaattcgtctgccatcaaatggagttaacatcatctttctttcatcaaacgatttatgatcaccaaatcttcttaagtcttgtcctatagcatcaaagtcaaaatcattgtcagttgagacgctattgaaactggtggtcttattgttctccttttcagagtcatttgatctccattgatcaactatttctaaattctctggtaaattaacaacatgcttattacaactaccaaactttatagtagcttgtttatcataactggcatttggtatcccataataattcaacatattgaatccactatgccatgtattataagattctgttaaggggtatatgtctaatggtttatgtttaaataattcaagaaatgatttggtttcggagaacgaactgtgtctagaataaataaatttaatttccattggtaaatatatttgatctttatgattcttaatatagttcatatttaaataacgtttattttcataagaccagaaaataccttcccatgtatcactttcttctgatgtcaggtagatatcatggaactcgtcttcctttttacctaaataaacctctttgtactcagatttggatagatctatagcgggtgttattttgatcatgggcttcttgtgtttcaccacattattcttcacataacctataaaaaaagtatattcagcatcatcattttgtttgtccaacatcatgttcaacttatctatattatcaattacattcactcgtttctctaactcgtagtatatgtcacctgttctgttgaaggcagcaaataatttcttcaatttatcgtctatgcaaatattacacctattaccaaaatattccccaacttttagccaaacttcctcaaatccatatgttagttgtgggaatctaaaatgtgtacctttgggatatgaacttatcaaatcaatcaattggtgaattccatttaaattttctggtatctctatatttacacctctatatgcaaaagttgtttccagatataacatattcaattttttatgtccgaaaataaaaggggataaaacactactagttttaaatgatgatataactgtatcttcaaatcttacatcaccagtatataatacattaatatcattttcagtaactccatccttcaaccttcgatcattaatgaaaatcatacagcttccaagacagtgaaaattcggtatgaaagtacattttaagttaggttctagttctattgtcttattcatagaaacaattgtacaatttgctagatttcgtctcaaagaattagaagttgaactatgtgcaagtattagatcccttgtagtctctgttaataatattttaactggattggtaagatttgtaaattgtatgtctaaacctttataatgatcagaatgaccgtgtgaaacgaaacaatatttgatcgtgttttccggtgttgtggtattttttgtgtgaagcaaactaaaattatccaccaatatatcaggtagcaagggcactatcccattaaatgttaaagctgactctgtcatattacttaaattgttgtaaatactttgtgttgttgatataaattatgttcaaaagaaaagaatattcatcgccttgaagcagaaattttggcgtttgtacatcaacaaaattcaatataatgaattttttagaatcttagaattaaatgatacacactgtatataaagaaatgattgacatacaatctatacttatttatctgaatcttttaaaaattcagcaagattagccttgaaatatttaacgaaaagttctgctctatctttagcatcaaaacatttttcatttaatgttaattcaagatccaatgattcaacatcacattcatcagtatttaatttataagtaacagtgaaacggtctgcatttcttgctggtgcaataatttcatcaaataacggatcatctaaatctgatgcaggtatgatattttcagcataagcttgatgttcagttatttcaataatctctgaaagtgctgatttaaaggcattaatttgagaatatctaacttctatattaacagggagggtttcagaaacaactatctttggttttgttgttggagcagatgatttggatgattcagactttgattctactggctttcttaattcgatattagataagtctaagtgagatgttttctttaaatatgacgcaattgatgaattaagatctttcggaattttacctaaatatgcaaggacatcaccctttaaaagtctaccatgtggaccggttgctggaatgtttttcaaagcatcttcctttgatattttgttttcagttaataaaagttcaacagatgggaataaaacttggtttggattagcggtatttgatatacttctttcagagtgagatttagttttattttcagaaacaggtgttggttctgcaactggttcctttgcagcttgagttggagttggttttggaactggtgtagattctgggactgcgtttgttgcattttttgcatcaagagaaggatattctaaagtatttagatcatcaccatcttcagccataaaagcaattggtgtaccgacaggtatatctttagttccatcaggtaaaatgattttagctaaaataccatcatctatagcatcaacagaaatagtagatttatcagtttcaatctctaataatgaatcacctgaattaaaacgatcaccttctttgattttccattcaacaattgcacccgactccatagttggagacattgcaggcatatcaaaagttgttgctgctaatatacttcttgaactatgtaaatatctagattgtcttaagacaattttagatgacacattaacagactttagtacacttcttgctctgaacatttgagttgtggtattttgaacgtctaaaagtttgaatatatgttcaaaagcaaacctttattggaaagaaacacctatcaactcaacccatcaaattgtaaagaggagatattaaaaatttcaatcacaataataatggcctaaaatattattacgatttatcggaggaacagtgttttccgggtctttacggcacgtgacctttacgtaagccataattttttgtattatgtaatctttattattttttttttcaatttttttttttttactacatgaaaaatttaatgaaattttcctctgcgatacagttgatgataagtattaatagttcagtttctgacaattaccgtggttctgaaacataaaacatggctaagagaaaggttaaaagatcatctgaattaagaaacatcaagagaagaaaggatgaagatcaaaagttacaatcctcagttttctcaagagttgaaagtgataatgaaatttcagatgttgaatatatcaatgatgatgaaattgataatggtaaatatgaacaacaaaaagaagaggaattagaagaagaactagaagattatgaaacaagaccaagagttttcaaaaaccctgaagatgaaggtgaagaaggtttaccaatccgttctgctgatggtactttcaaaagacgaattattaaaaaagatatcaaaacaaaagaaaatgaatcaggtggtgataaagaagatagggatattgagtctgatgatgagaaagattccgaatcaaaggattctgataaaaaggataatactgaagaagaagaagaagaagaagaacaatttaatgaagaagatgatgaatcatataaaggtttaacacaagctgaaaaaattatcaaaactaaggaagatattgcggaaatggcacaacttttaattgaggatccagaagaaaatatattacaactttcaagactaaggaaaatgtctaattctaaaaatccattaactgcaaaattagctgtattagcattagtcccggttttcaaaagtatatcaccatcatatcatattagaccattaactgaagttgagaaaaaagagaaagttagtaaagaggttgctaaactaagattctttgaacaacatttagtcttaaactataaacattatgttgatttattaatgataaaagcagcaaaattttccacacaatcgaaatcatcaccacaagatatcgaaatgggtatcattgcaacaaatgcagcatgtgaattagcatcatctttaagatttttcaattttagaaaagaaatattaaaactattgattagaagaataatgaaaagaccacagaatgaatttgaattaaaagtatttaaaaagagtgttaatacacttgatgaattgttaattgaagatgcatcacatggtgatatatcacttgaaattgtcattttattatcaaaaagtataagaagaagagattttaatgttgatgagagtgttattaatatcttattatcattaactgttttaaatgattatcaaccaaatgctaaagaattacattctgacgaagttgttaaagtaaaaaagaaggatagagttcatttaagtaagacacaaaagaaacaattaaaggaacgaaaattaattgaacaagaaatgaaaaatgctgaacatgcagttacaactgaacaaagagagaaaaatcaagcccaaattttgaaaatgttacttacattttatcttgaaattttaaaagcaagacctgcaaaattaatggctcccgtattagaaagtttatctaaatttggtcatatggttaatattgatttgatgggcgatttcttacaaatattaagagaaattactgaagaattattacaaaataaagatttgaatgcaaatgaagtaagacaaatattattatgtattatgacttcattttcattagttgcaaatttaccacctagaaaagttgtcgttgatttaaacaaattcgttgattatttatattcattattaccaaatttatcattagacacagatatagaattttcacataaatcacttagattaatggatccattatcatcaaatgaattaaatattaaaccttcagttaatgtttcaactaaagctgaattatttttaagatgtttaaatatgattttcttcaatagtaagagtggttcaagtaaaagagctttagcatttacaaagcgattatatttagctgctctacatttaccggaaaaaaccgatgttgcacttcttaaatttttagaaaaattaatgggtaaatatggggaaattaaaacattatactcaacagaagacagaattcaaaatggtgtatatcacccagaagttaatgaaactgaaagagcaaatactgaagtggctgtcttatgggaaaatgttcttctaacaaagcattacgctaataatgttgaaatgaatacaagacatttattcaatcttgcaaaataaattatacaatttgacaatctttaaatgtataaaataaataaataattttctagagaaaaaagtaaaaaaagttaaaaaaaagttaaaaaaaagtaaaaaaaatcaaaatttatataaaagtagtttaaatgttatttttttaatttgtatttgtatttgtatttgcttttgtttttgtttttgttttttgaattagaaaatgtaatcgtgaatgggagaattaattctcttcgatatcaaacaaatcatctgattgttcatcgtttgaatctattaaattagctgtgtggttatcattattattaggaactgcggatttggaaatattattgaaaaaaatacttgattttgttggagcagacatactaatttcattatgatgattactattctttgatgttaggaatttatcaatgttgatattaggagtttcagttgcagaatgtgaacttcttctttgatgtggtggaatatatttcttcactgattttggactcgtaccaatatttgatcctacactggaaaaattattagatatagtcgtagtcagtgatgtatccctggaattttgtaatctttcatcaaacattttagtgtcattgaagcttttggttaacatgtcgatagcattggattcaatttgataaaaggaattgttataattttcagtatttgatatgttttcatttgagctgtttctcaaagttccactgctttgttgttcaaaatcaaaagagaattcatccataaaatgattattttccttatcattttcatcgttactagtgttactgtgttttccgtaatcagtgccattatcaaatttattctcattatcattgttttgtgttctgttgtatttttcttcaagatttccatcaatagtttcaatatcattttctgagtctgattcatcatctgattcaatagcagatcctaaaagaatggatgaatgcagtcttaagttaggtggaacatatttcccgtcaattgaagctctcaacgaactagaaacacgtggtgcattgttaggattatgcgatgatcttctattattatatgatgattgctcgtgattatttgaccaacttgagccaaagtttcggttatttggcttaagaaagttagatttattgttattcattttgtttctataattattgttattattatatgcatgacttgatcttcttcttctcttttgccatgctcttctatttgaataacagacattatcatactcaattgaatgattggaggaactgtggaagttttgattattattatgacttgagtacttaaaattgttttccttattattaccgtaccttttatagtaatttccatgttgttgaagttgttgtttacccttgtaggccttttccatataatgagagaataccgatttaggtgtgaaaaaatcttttctattgaaatctaaagagtcatctttgaatgaattacgatatcttccactttgagattggttcttataattgtaatttgcaatacgtaacggtttacgatgaattggattccatcttttaactctataattattattgttgttttcattactcaaatgactgtttttattttcattgttgtgattggataaattataagtattaagcatattaccatatttgctaactctctttgtatcgacggcatattttttgtatcctaaatctgaatcattttgttcgttattttgaataggtattggcttggataaagtatttgaatttttattcttttgatctttgaaaagaggaatgtcaaaaatatcatccaattcatccatttcatcttcaccaataatactatcgatagagaacatattatcttcacgtacaatattgatagcaggtatatatttggagtttgagtgattggtacttggattgctatgagatttagatttttcattctcattagattgatcactaccgttagtatttttctcagtttgatcttcattatcatttgacaattcactgactttagaatcttcaacttcttcttcaaattcataatcataagtcaaaacatcaatattatttaaactctgttttatcatttctaaatctctattagcaggatcaattgtcaatgaatggatcataacagaaaaaaggtcataactcatgaatggaaatatatcaaacaaagtttccctattagcagcaaaatgtaaaaacattttatcctttgaacttgctgatctgaatggtgatttaccaaagactatatttagtaaacaaatacctaaagcccaaatatcaactttatcagcggcataactatcaatatctgaatgttctaataattctggtgccatataacgttcactaccaacatcaaagtctgtacatattaaacgatcggttgctaaaccaaaatctgttaatttaattgaccaatcatcatttattaaaatattttcaggtttaatatcacgatggtagacaccatttttatgacagtactcaacagcactaatcaattgcataaaaacatcgataacatcagcagttgcaacaggggcaatacctaaatgaatagcatcatgtaaatcacctcttggagcatattccaaaaccataaaagtaccaaaagaatcaatcaatttagtaatatttggatgattatcaacttttttcaacattaaaatttcttgttttgtttctctttcaacaatagatttactaacatctttatttcttgagacactggtatttgagaatgctgaatttgtagttaaattcacataagatttagttttagaatctaaactgaaggatttaacttctgtatttacagaagataatttattagttatgttatctcttggtttaacttcattataagcttcaaaatctgataattttccagtattatatttgacagcaactaacttattcccatttagggtatctttagcgattgatacaacaccaaaggaaccctcattaagactattaactcttaaatatcgattatttaagagatcaccttgaagatatttatagtagtcagattctgaatttgccatttttttgctatgtgactataatgttatatttccgttattttgtcaaggatttgttttagtcaatagaaaaaagggataatgtttgaatatatttaatatttgatgatgataatgatttgttccaaaataaagtaagcctttcaactaagtatgttgaataaatgcaaatgcaaagataatatgagatgatataggtaaataaaaaagaaacagaaatgaaaattgaagatttaaaatatatcgtcaaaaagtctagataaggttagtgaaataatgatcggggtcgaagttgaacagaaaacttaatattcgaaagtattttggaatggtagggtatggttgaatagttgtagttattaataggaggttaaagatgtagaagaaggaaaatagaagaagattctagaagagtaagtacaataaagttattatctaaactcacttaaaattaaagattgccactaaaacaaacccttctcagtccgtcctctctgactcagctaaaatatcctgtcatttcttattataatttctttgctggcccatgcatgtttatttataaaattctagttttttacgtaagccagtcgcgtcgcattattttatttttttcattggtcacgtgatagtttttgtaaattattacttattacgtaatcattataattaattttcttcgtatataatgttcaatcagcagataaagaaaactgggaccctaaagacaccaattgacttcactgttttttcatatattcccttaattgcaacatatttatcaatcatgagctcttcaaaacgtaaaggcaatattccacatttgaatattgtaactaactcaaccacagactcactgagtaccatttcaaatgcatctgatcaaattcgtccactactatctccgattgtctccgaacctgatgaaactccttcaataaaacaacatttacatgataaaatgttgttatcaccaggtgatgctgatgatgatttacttttaagatctctcaaatttgcttcaatgtcaaatactaatttattatcatcttataataatctcagtaaatataaatcaaattctagattatctcttatatcatcaaaatcaagtttaaaacaatataaggatgatccaacatcttcaactgatccaacatctttagagtctccatatatatttcaaccaaataattcaaaaataatacgatcgaatgcttcttttcaaattcaacaacaatcccatatagtattacctgaaactcctgaagaggatagtgatgataatcatattgatgaaccaaatggaataaattcacatggttgtccaagtatagctgaatcactcattgaagaagcaacatatttaagagatttaacaatttcacaaattaaaagaagaagattctttgcaatttcaatattcagtatattctgtattttcatattcaaccttatatttttaccaagaacttccctagatcgtgatttaagaagattatatggtggtagtttgacatttgatgatatatcaagagtttatattaatcaattacattataactccaaaataaataattatttactgcattataatgaaaatactcatttcacgggcaaaaatcataaatttatagaaaattatgcagaaacatttgaatatttgggtataaatacggaaaaatatgaagtttatatgggcaccccaattgatactagaattcaattatttaatgagaagacaaagaaaataatatttgaacctaatttaaaagaatcggatacagtatcatatattccatatagtaaaagtggtacacttgaaggtaattacgtttatgttaattacggaacaattgatgattataatactttaaaggaaaacaatattaaaattgaaaataacattttcatcattcgttacaacaaagaaacccatttaagtttaattgttgaaaatgccattaaaaatggtgcaattggtattataacatataatgatccatttgatgatgggaaattcacagaaaagaatggatatatgaatttccctctaggatattcaagaaatcatcatgaagttgataaatttacttcaaattatatttattatcaacccggtgatccaacaactcctggttggtcaccatatcttttccaagatcataaaagattgaaaaatccgaaaactataccaaatatacccattttaccgattagctttacagaaattgaaccattgctaactaaacttaatggtttgggaccaaatttaaattgggtaggaaatttggaaaattttaagtataccccaggtccaagtgttgattatgcgattaaattaattaacgaaattgattacggtgttaaaccaatttataatattataatggaaatacccggtattataaccgatgaagaaattattttaggtacatcaagggatgtaattagtggattaggtggattaagtaatggagaagttggattatttgaaattgctagaggattcaatgaattagccaaactaaattggaaacctttgaggactatcaaattaatttcatgggacggttcaaatcatggacagttaggatcaaccgaatatggtgaatattatgcacagagattgattaataactgttttgtgtatattaattttgataatatcagagggaataaattatcaattaactctaatccattatttaacaatgttttgaaaaaagttatggatttaatattaatcaacaataatgaaagtttacttgataattttgaatataataataatacgattggtatgataagtgaagaagtcaatgattatactattttccaaaaccatcttggaattccttccattaatattggttttaaacaagatgaaaatactgatcctgtttcatattataattctaattttgataatcttgaattgttgaaaagttttgatccagatttgaaattacataatttattatcacagtttattggaatgttagttattgaacttagtgaacatgaaataattaatgtttctacgaatgattatcttcaggtcatatcaacctctttaaataagttatatgatagagtcccaaaagaatggcttgaaaagccaatgaaatacccatttgattatcaaaaacttgaagacgaaatgaaaaagttaaataacacagttcaaaatgtattagaacttactaagatttttgataaagaaatgaaatcattacaagaagaaattattcaagattatccctggtttaaactgttaaacaagatcaaaacagctatcaaaattaagatgtataattccaagatcaaatcattggataagatgtttgttacagtattcaaagatacagagcaaagtttatcagttattaggccatggtacagacatttaatttttgcaccaagtttacacagttctgatttcgattctaattcatcaagagtggatattctacctggtctaattgaagcactcacttctggaaactttgaactatttgaactcaacttaatatcattagatgataccattaatagaatagcattaacattgtcctaatcagaatatacacgtctcggaaatttagcttagccaatttcggaaatttcggtctcacctccactatttttgcaaaattatgacagtttttccaacattgaaattaataattaacagctttcacttttgaaatttaaatcttaaccttttttttatagaatcttttttaataatataaatatattatttatacaaccaatatattagagcaatgtttaacacagttagaagaaatttctccacctcaagtgcacaattatcaaaagtttactttgatttaactattaacaactcaaagcaaccaagaattgtctttgaacttttcgataaaaccgttccaaaaactgcagaaaacttcagagctttatgtactggtgaaaagggttttggttttaaagactctattttccacagagttattccaggttttatggctcaaggtggtgatattactcatcataatggttatggtggtaaatccatctacggtaataaattcgaagatgaaaattttgaaattaaacacaccaaaccaggtcaattatcaatggctaatgcaggtccaaacactaatggttctcaattcttcattacaactgttccatgtccttggttagatggtcaccacgttgtctttggtgaaattactgaaggtcttgatactttaaagactgttgaaagttacggttccccatccggtaagccaaaggctgaaattaaggtcgttgaatccggtgaattaaaagattaaattatgaagtttatgttacataatgatgatatataatttttttttatttagttagttacttaattaattatctataacaatgatttagtgggtattatgatttttatttactattatgttctctttcgtcattcatctgttggaaaacattatgtgcactcataaagaaacttgattgttgaattccaaactttttaattgtttgaaattgagttgctgattccttagtcaaatttgaaagttgttctatatttttttgtaaagtttctagctctatattcatttgtttgataatatcatcctgtttgggcatcaatggaatattcagtcctgggtagtcctatttttaaaagaaaagacaaacaagttaaaaaaacatgctgatgctgaggtaaacaaaaaatatcattaccatactaaaacagttttggaaattgatccatttacaggtatttttaacaatgataattgataggtttctacaaaacatacaacgattgaaaacatatggatcgtataataatggtaagaaaataggtattgcattatcaggtggtgttgattccatggtaatgcttgatttattagttaaattacgaaaacaacatttttccaatcttgatattcatgcaattactattgatcatggattacgaggtgaaagttctacagaagcaattaatattcaaaaagttattcatcaaagaaagaaatatccaataacgcataaaatattgaaaattaatgaacaaattaatcctaatcaagtagagaaacatgctagagaattaagatataaattaatgtttcaatattgtaaagatgaaaatattaatgaattatacatgggacatcatttaaatgatcaaattgaaacttttttgttaaggttaaaatctaattctacattatttggtttaatgggtatgaaattagaaactccatcaaatttatataattcacatcaaattgatctcattagaccaatgttgaatataaagaaggatgaaatatacgcatatgctacacaaaatgatttaatatggtttgaagatcatactaataaggatacatcattaacacaacgaaatcaacttagaaatgcgattgaaactggaataataaaagaaaatgatataatacaattacatcaatcacttgttaaggcaatggagaaaatcatttataaaccaatgaaagagttagacaatgatatggtagtcaattataatatatctgctttgtctgatttcaatatatctttattatcattaaacattgatataaatatcaaggataaatcattactaaatgttacagattacattattctagatcgttggatatttaataagatttggagagttagtccacaaattaaatatcattataggtttactacatttgattctaaaaactcggtaattataccaaattcaaaatcacatagttttacagaagatgttttacgtgttaagaaaggtattgttaatatttctggttgtttaataaaatggaaacaagaagattcaaatattaaattaaccatttatagagaacctccaagaagatttcaagaaaaatatgagagttataattcgataggtgaaatttgtttcgataatagagttttcttaaaatcttcaaaaccttataatgttgagattttcaatggtgaaaaaacatcgattgttagtaattcaggtgttaaaagagaaattacaaatataatgaacttacctttaaatgtaaaagccaataaattaatgggtaaaataaaacaattttatttacctgtaattagtgctccaaacaattcatatttcccaacatttcaacaaaaaaacaacgaagtgaagtgtttcccaaaacgtgatattttgatataattatttatttggaaaagtaatgatttagattggaatgatgtacataatttgttatatagaataaataaaattcaaaaaaagtaaagagataaaaaataaagatataattacggtgcatgtataagaagtaaattaatttgaattgaataggaaagcaagacacacatacactcgacacacaaacgacaaatcaaaaatggcgaaaaattggaaaacgtagaaaactaataattaaaaacaatttgaataaagaaaagaacgaatatatgcaacttagtgtgatctaatcgcaatttgattgagataatttcattaaattagctcttgaataatctgcaaaattagacaatgaattataacaaggatattttggataacttaaatatgatgaatcgtcgtaaatactgacattgttaatattgtttgatatattataattattatcataatttaaaggttgagatgaacttggtagtaaagagtaagatttcaatgacattattgaaggaacttgaatttgaatatttttcaatgatgtttcaggttcaaaatttggtggtgttttaattgatgaatttgaagaaattgatgaaattgatgaaattgataaagatttagtatttttaatattaagattaatattatcatttgaaattgaatcaatagtattttttgaagaagaatttaattttaaatttttcattgttattgaatcgtttttctttctaattcttaatttttttcttaattcaatgaattcatcaggggatttctttggaccatgtttatgaatcataatatgagtatttaaatgatttaatgttccataagctttagtacaattattaaaagtacaagcataatgtctttcaatttcagaatgtttctttcttttcctcttattagttaaagaattagaggaagaattaagtaaacgtaaagcatttgcggataatgaaggatttgaagatgatgaatttgaatttggtattaaatttggagttgatgttaatgataatgatggtgttaaaagtgatgatagagatgatgaagatacatcagattttgggaagtttaagattgatattgatcttggaattgataatgataaatctttggattttggtttaggttgggatttggattgggatttagatctagattttaatgttgatttcgatgttgattttgatgatgattttgatgatgattttgaaatttttgaattattatttgagtttggaaatttagttatacctaaaccagtaggtttactaagataatgattatattgattaaaataattatttgatattgaagcagaaatatttgttggagaaggagcaaaattttgatgaattgttggtatattgttattattgttgttgttagcaaatccattataattagcccaattaaaatcatgtataggtgattgtaaagaatcatttaaatgatttgatgaagatgaagggaaagaacttgagtgactcaagtaagaagaatttggggtaacacaataattggatgaactgagtgatgaacatgaagatgttgcttgtaatgcataaatattgaattgatttgcattaacaggttgaggcataagaggagataactgatcatttttattaatatctttttgattaatattttgattaatattttgaaaatttatagctccaatagttgaatttgaacttatcaatggaggtattgttgggatattaacagtattattatttaatgattttggactattttccaataggctatttttcaaatgattattcatcttgaatattaaatgatatttcaaaaaaaaaaaaagaatatcaagataagcaaaccaaagggtatatgaatgcttattgatgtgtgatttaaatacagaaaaaaggtagctttttaacttcttttgttttttttttgcctttgtctttaatagaaagctataattaattaatagctaataaagataggtttatttgaataaattagagaaaacaagatgaaaaaataatagcaaaagctattaaatagatacaaaacgagatgaaacgagatcagatgaagatgaaacaggagttgaaacagtgctgatgtctgagactttaaataaaatttatgattgagcaaaatcatgatataaaatagaaagttttagaattatgaaactatgtttcatctatttggggcattaacattaaatttacttaatattactattattattattattattattattatcatacttccaatgctcatcgctatacaatagaaaaagggcaattttgcttatctatgcacattgcggctttttttcctattgaaaattatttaatacctttcaaatttttattatatttgccccaaatctacgaataccacatgcagtaatattggatgttaaaaaatgtactttgatctagatctaaggcacaggggcattttattattattattattattattatgataataatctcattgcattaattcaactgttttatttcttaatcaattgatctacattgtcttgatatattaatatactttacattcatctcttaacttcctataaaccataaactttatagattcgctaaatgtacgttgagttaaaaaaatatatgtaaattgactaaaatataaaatttttattattataatatactttcccttcgggttaaattttatagctctaacactaaccattggcaaatttttcctttcttctaaaggtaatttgtaaatcttttaaaatagttcctttaattagtgttttctacagttttcacagtttttctttcttttgtaccacccgcaattttaatttaaattgccacattcttcccaaataggaaactgatctaattttggttagtgcctcttttgtttaattctaaggacataaaaggactccgattaagtatatacctctttagatgaatgagactaactagtaatattcagtaaccaaatgtatgttggtttagtccgctgtaactttatttatagccaccggcgatgattctttagttcccagtaaacttcccccgcgcttaataaaaatactggggattcaaaatttttacgggtagttgaaaatgaagttacaacggacttaactaagatacattcgatttttacatattactagttagtctcatttgattaaaaagactgtataaacaattatttatattagacttttatttatgtctgatgatatttatttatagaagatattattatcattatcattattattatcattatcattagattaatataatttaacatttctggtgtatctacgtcgtctaaactgtcctgtaatatcgtaaacccatccttcattttcattatctttaataaacatttcataatcatatccataatcataaacccattgcgtatctttattaatttcccattgttccccatttataaaatcccacttttttatttcgttattcttaatggtattattattattattattatttttattattattattattattattattattattattattattattattattattatcattgttatctttttcagtagccatgacattatctctcgccgttttattgttaatttcaacgcccatatttaatgatagcctaatattattgttatcttccattacattatcatcattcatatcatcattaacattattgttaatgttattattaatattgttactattactagtatttctagttccattagttattaattcaaataaattcggtgctaacacttcatttaaatcgtaaactaaatttggtttccttcttttcattcgtatttcatcacttaaattgaaaatacttgtactaaatccatagaattcatattcatctaaatttagtacattctgtttactaatttcaaagatttcaacttctctgataaaagcgggttcatcgattataatattatcccggaaattagtacgcttttcctgctttccatcaactttattttctttctttacgctgtttttgctaccattttttttatcttcaatcatattcattaaatctttcattatgatctttctataagggtgattaattaacattccaatccatattcctaatataaatattactttccatggaatatatgaacctaaacaaaataatataatacaaattgttgatattttgtataataatattgttgaactcttttcattatcaaaattaaaatgaatagtgtaaaacttttcagtgctactgataagatttaataatttattgctctgtaattgaatttcaaataagttcttcagtataaaattattataagaattggaattagaattggaattggagtttgattcgtctttagttgttttatgtatggttgaatttcttttagtttcaataaacttgcttatgttttcaaaatcatttatgtttgattcatctaactctcgtttcttaagtttaatttcaccatccttatcaaattctaaataagatgatactacctcaatatatctttcaactgttggtaagtccttactttgattatattgtgtgatatttctattagcactaaattccttggcatgaatatcattctcttcaggaattaaaaatccaaaaatgaaatcagtattgtaattttcagattttgtatattttaatcgagttccaagtccttcatcccaatatttttcaaataataaattatttgttgcattacttggtttttcaattattggatgctttttagtataattcattgataatttatagtttaaatagattaacgaaaaaactaaccaaagatgttgataaatacatccccatgtatataataataatacacataatgttttctcatcagattcccaattaactattcgtgaaatttcattgaaaatattaataaatttacttattcttgttgataactcttgaaaattatttgaaatttttcttaatgataaagaatcaatatcattaacattgttactattactattactgttactgttaccattactattaatattattatccttgttcaattgagaatcgactgattggttaacatcataaccattaacattatctatcattgatccgtcggtaagattatcactatcagccgccaagttgtttttttcaaatttccccatatacaagacacttcgctgtatttcatttttcctcatcacagtgattaaataactaaataatttatctaatgtattgatcttatcaatcagttcattatcaattgatccattagacatcatgagtcaataatgagcatatatgtctgaaattagaaattaattaatgtagcaatactgaaatcttaaaaacattagttccaagctgaaatcgcaataaactaaaagaaaggcaaatcttgaacaaagttaaaaattaagaaattaaaaaatcaaaaaattgaaaaaattgaaaaaattgaaaaaattgaaaaaagtggaaaaaaaaatgagaaatgcatagtatacacccggctatcccagcatctgagtgtaaaaccgtcgtatatagccttctttatgaggaacaagtttaagatctttagaaagtaataataagaatttaggaaaagaatctgaatttcaaggtaaagtttttgaatcctcggagttccccgatctctctgtctcttctctctcatcccctccggttacattgctctccctttcaaagtcaaattgtatgtcacttgcaatatttctaatatattccataaaatataacaactaaaccaatcatgtaaaaggagtcattatttatcggatataatagtttccaccttataatatattatttcacatgcattatcttatctttaactgattaaagtttggtaaaggggcatatttttgacatattcgaaaaaatattcgtttaatcgggaaattatcttacctctgggttaaatgcagtgaaactttacgatggtgtcaaagtcacttgaatcttgttttatactttgcttttctttcattcatgtttgagataatgtgtttttaaaatggtagcaataagtaatagagtttcagtaaatgagtgtggtaataaatgaaacacaattgctattctaataacattaatatttccactcaatggttgttccttacacggtaactttgaaagaaattcatggatagcagctcttttatttttgttttggataattttgctatattttgttgtatatgatagcaaataataaaataaatattataatacactacattactattattactccgaatgatgtgtattttaaaggaatttaaggttaaacaacttgaaggttatattgttgaccttggaaaaaaaatttatgaaaaatatacggggtgtactttttcttttgaataagattggtgattttgttttatcgatgatgttaaatatatcttacacatactatagattatatacattggaaagaggaaaataatttatatattacccattttcctcttcattaatcaataaacctagaaataatttaccaaaacatggatttaatggattattataatgttcataaggatcattcctatctaatctatcaccacaaaggatacaaaagaaaactaaacatttagaacatgtcattttattacaaccatctgatttttgtatgaatgttgaacaacttgggcatttaacaatacctgaatcttctgatttaattaattcatcaaattgtttttgtgctatataatcacttacagctaattcaacaattcttttaccatatttaaatgaaatatttgaacaaatttcacgttgttccatattctgttttgatggataatcaccattattttcaatccatttttccattatttcaattggtatattcattttatacattgaacatgaattaattttaccatgccaagaatggaaacattcacaacaaaatgcaaatttacatgatggacaaatagttaaattagattcaacatcttgctttataaatgttgtaccacataaacttcttggacattcagtaactctattggggaaaaatcttcgaaaattgttaatagaatttctaaaatgtaatgtttgataccttttaattaatccatctttattatcatctaaaaacctttccaaaagttgtatattaactggtaatttgaaaaattcaatttcaaagttatttatattaaactctttaccaccaatttctgcatctttgaataatttactaataaattctttcctctttttagtacactgaaatgatggacaatgaatattttcaatttcacctctttgaataatatgtgtgaaataatcttttaaacatttattacaaaaaatatgattacaatctggaaattgagttgagttaacacctttttcttcattttgacaaatatcacataaaaatgtcaaattattgaaaatttcaattttagcaagttcattttcattaataaaatactgaaattcaactttattatcaacaattaattcattgctattattgctattattaaatttattaaaacctatttgtgaattagttttcaaataatcaataattgtgaaaataactggacttcgtaattccgaccataaatttctcatttcatcttgaattttttcaatatcattctcatttaaccaactatcagtattactcaatgttatgataggtggatcatcagttggataacttttagggaaattaaatttacattcaattggtggtaaatgttcaatcttctcttctgttttattatgatcatgaaattttaaaacaattggtgaatctaaaaacaccggaattttaatactacattccctatcttctctatttactatcaattcaggataaatacattgtactacatcccactctgttaataattcctcatcatatacttccaaatcttgtgacatccatgtaccataaagagacagttctttatgataaaccgatcgatctataaaaaagtaaaaagattttgcattattattaatcgatgtagtgtaatcatcatcggagattttgaaaaactttattatctctgtggcggtgcttctatgcatttatacatgtggcgcaggcttattacgtaactaaaggtaaacaaagaaggacgcggtggctggttacattaaaatttcaatgttttttttttcataagatagacgattggtgatctgtgaatgatatatcgatgggtaaatcagtattctgtactgaccatacataactatatttcacctaacaattatacctgttctgtcattgattatctatttcaaccaactattgcttctttccttgcttctttcaagtttttcttaggtatactttctttcttttccttttctttccgttccgttaatcattgatttttatttcaaatagacacgttcaaattcataagaaaagaaaagcatgttaccgaagaaactattatattatttagtaccacaagtatcattcacttcagcaattgatactccagtcattgatgaaagtatcttacttttaggaaattttgatgctatatcgttatttaatgaaaatacttataatttatcatcacctccaaatgatttaaacctttatcagttatcttcaacaaatgattcaattcatttattaccaacacttaatataacaaatcctccatcaatatggcatcctttaaatgactctaattctttaatgattattgataataaaccttatattttatcactaactacttcaactgttacagagttatcaaattggaatgatattaatggtaaaattgaatcaatctactatgatgaatcatcagatattatatattttggtggttatttatcatttaataatacatatggtattgttcaatatgattattcacaaaataaaatattttcattaccatttggtggatttgaagaaaattccataataaatacaattttcaaatatgatcaatcagattcaataatatttggtggtatgtttgataatattggttattcaaatctattaaatattacttataatgaaacaataacaaataatacattttacagaaatacttcaagtttaattgatttatcacagaaaattttaatttcttcatcacaggtatctgcaactaatggtgaaaattatcaaaatatgatttgtccacaagatgatttatcaaatgcttggatcttaccaaataatgaaattggttcttggtcagctgttttaaatgatgaaataaatccttcaaagattagattatataatgcagattcaaataatgatggtgttaaatcttttagagtcataacatatcctgcaaatggtattatgaatatgtcttatattgatccatctgatttatcaattaaatattgtgatgctttctgtcccttatatttaaaggaaaatttatcctcggcattatcaaataataatgttacaaataatcaatattatacatttactgataataatcaaactgttttgcaattgactaatacatatcaagattttgcatttgttgattcaattggtgttaattctttcactgttcaaataatggattattatggtgattatgctgctttacaaggtattgagttatcaagtcgtggtattaatgtttatgcaaataatacacttaatcatcttgaaaaatgtgtaaatacaaatcaatatgatattgatgtaaattcaaatactttaggtgataatatcaattggcaatcaagtagttttggtaattatctttttgctgaagttgatacaaatgatattacttctgatgaaggtattgaatatactgttaatctacccgtttctggtgaatattcaatcttaatgtatacaagtggatgtcttgaagataattcatgtgctaatagaggtatcgttaatgttaccgtctataatggtgaagatcaactgttggcaaataaacttatttatcaaactaatgattatgaaaaatatgatgttttatatacaggtgatttgaatcttaataaagataataaaccagtctcaattcaaatgacattattaaatcaatcacaacattcaccaatccattttgttgctgattcaatagaattacaatatattcaacttaatgttaatgaaattacaggtaatattacaaatagggtaactgttgaaaaacatggtgaagttaaacttaatggtatttttgaatataatccatcaaatttcactgattcatcaattgaatatccaattggtaatactagtattaatttaattggctcattattggatcaaaatgcaataatcaatcaaattatttataatgattcatcaataatatttgcaggggattttgaatcaatttatggttcatctcttttaggtgcagaaattgaaactaatcattcaactttattagcaacagatttttactctatagaaggtggtactgatggtaaagaagtttctcttctatatggacctactgatgagtttgttatgattggttcatttaaccaattcaaaaacgatacaactaattcaataatcgatggttctgctttatataatagtgctaacaatagtattgaaacacttaatatatccaatactgatgctattaatgaaatttccggattttatttcaataaaactgaataccttgttttcaatcaaaacgattcaacatcacaattatttgattttacacaggatgaaacatttttgaacacatctgcattcgaaatgaatattttatcctcacttgattcaaatgataaaaactggatgttatttaatgataatgaagattcacatgtcattggatctattaaaaaatataatacatcatcaaacaatattgttggaattgataatggtgttttaaaatcattcacttctactaatgaaacatttaacactggtgcttatattaatgataatacatttgctgttggtggtagtaatgttttcctgattaatgataattcaatcaatttattatcagaaaacttaaactttgattatggatcatcagttgaatctcttttatactataagaacactttgattttttcagttaatggtaaatcaagttacaattctgatcaaatcaatggattagcattctataatatgaatcacagctccatcaaaacattaaatgaaacatttagtggctccatcaatgctttggctgttgatccccaatatggtaacatcattactggtggtgatttctctgtcggtgattgtaatgtactctgtacgttcaataatgatactgacaatttaacaattaataaaacaatttcaggtttatccggttccatttcagctttgaattattataatgaatatcgtgttttagttgcaggtaattttagcagtggagatcaacatggttatatgggtatttatgatacttttaacaatagtatatcaatgttagataatttcaactcgcaattatcaggacctgtcaaatccttcatttttggaaatgaaacagaaaacagcaaaaatctcaacgatacaatcgttgtcatgggtaatgattatattgggtattttaatgactctagatggaattcacttggagatggtttgaatttacgaaactcgtcattttcaggtatttctctggttaaatcttcaactgatagtttctataatggacaagctttgttattaactggtgatatttctactgaaaactatggtattgtttcaagtgctatttggaatggtgcacaatggattccatatactcttacatcttcacaaaatatgagttctaataatgaaaaaggaaagtcagttgtccgtatgacatcaatgtttttataccagggatcatttacagaaacagcaacatcatcatcaagttcttcttcctcctcttcttctacatcatcttccacttcaactcctgatgaagataacagatcattagattttactaatggacaagtcgctggtgttggattggcattggctattggtactctattattattaacagcactaggtttcttatattcatttttgggtggtaagggtgatgaatctctggatggtttgaaacttaccggagaagatcgtttacaggatgttgttccgccatctaatattataaatacaggttccgtttaagtttcctagtaacatttttcaaaaatctcttttacgttttatctttcatttcttgctttaattctttaattttgtattttactgtgtacttttataaactatgcaatatcaattgtaatttcttcaattgatcatactcttgtattaagtctaaatttatacaaaccttacgtaatctcataaagagatcaacatttcagttgttgtttaacaatcaaacctcttgcattttagatttagttttccttttataataatcctctctcagctataaatatggatctgaatatccctagactctatggtaagcttggggaaagctcagatatcaagattaacacgtttgggtgtaccacttcagctacatcacaaataataaaacaatcatattcacctaaaatttctatagtgagtacagaatctgctgatcgaatagccaaacaacattcagaagatatagataatatacaccaattattcacttattttgaaaattcattagcatatggtgaatcatataatggaagttttgtgtctaatccgataccgtccaattcaattgcaaatatcaccacatccggttgtgttaaatttgttggtgatacaataaacttcattgataacaaattcaattcatcagatgaactgtttaatcttgacgtatatactaaagatttaaaagactatgtgagaaaaattgataatcatatacgattgctgaatgattctccgttagattataattcttatcgtaaagatgttcactccatttcaaatttagaaaacagtatttatttgaaaatgctaaccatgctgagttcatctgatatattgtcatcttttgaatgtttcaatcatccaattatgcaattggctgtaataagtgggaatgattcagatgttgctgtcaaagatttaatatcatcatttgaaaacaaaaagtatcctgcatggtatgataaatcttcaactttacaacaattcatcattatagtaaataaaaatgataatgaaatgctccaaaatgctcttagaatacaagaagatttgaagataaaaagaggtaagaaaagtaatattataacgattgatattgaattattgaataataatggtgataacgttgatagaatagaattgatttcttctctgtttgtacagaatataaacgaagataataaagattatgagaacaattctattctcaagattagtaaaactacgtatgatatatggaagggtatactttcagagatcgtattgaaagatttaattcttttcatggatgaaaagatgaaaaaatggaatgaagaatttattcaacctcgaacgagtttaacgggcagactgtttggtggacgtaaatgggggtcaaatagtaaaccttcatttttttcatttggttctaatcaatcgaataatggacaaaccggaaaagcaaatgaaattgtttcatataatttatccggtggatattatctagcaaatagtcctgaaatgatgataagaaaattaggtgattggtatttcatgttaggtgattataaaaatgcatacaccacttacgaacttgttaagaaggatatgataaatgataaagcgaatactcatattgcatcattacaacaatatattatattttcattgattttaggagctacgggagttccagaaattcctcaaataacgttgaaaatgatatccagtatgataaatcccatgataaattcatctttttactctttcctatcgagaagcaacttgaaaagttatgcactacgttttgttattttaacagctgaactttacttactattaggtcaaaagactaaattaatgatacaaccaacagacacgacactgtattttaacgaatcaatcgatcattttaaaaaaataatagattcacaactaatggactctttatctactagctttcttatgcagagagttgcgtatacgttttactcttttggtgacactcattcaaatgttcaaaatataagcaatccatattacgaagaagaaaatttgtttaaattaaatgtactgaatccaaatttagagaatctagggagtacgagatatagaaaagttcaactttggttaattttatcagcagaggaaatcaatttgaaagaacaaccaatacaagcccaaatcattatatggaggttaaaggatgaactttccagagatcctcttaatgaagcaaacacaaaatggttagaaaatcctaaaggacttttctaccaaattgaaaatgagctggaaacattgtaaacaaccatgttaatagctatatattctgtaaatttgtattgtataatatcatctaaagattaatagaagcaattgtgcaatgtagatcattacataatcaattcccatataactgtggacggtctcctcactacgcgatcctttgatcaaaatttcaatcatcgatgttgaatcatgcagaccttcggaatttgaaaacattgttatacgtgttcattgtcaagtttttgtaaattctactacaagtaaacacaatggctcaagtcttttttgcaaaggttaaaagtgttctatctgctgatactttggttcttacctctcaatcaggtaaacaagaaagagttttaacattggcttatttacaagcaccaagaattcaagctaatgaaaagtatgcatttgaagcaagagaaattttaagaactttattagttggtaaacaagtcaaattttggattttatacaaaaacagttcagatagagaatttggtgatgtttccactccactattccaatcattgattgaatacgttttatcaaaaggtggtgctaaattaagagacaacatcaattcattcgatgatgatgaagatattgaaaaatatagatcaattcaaaaggaagctgaatctgcaaaaattggtctttggaatccagatgttactaaagttgaacttgttattaagccagaaattacatcaactccttacgatgcaattgttgaaaaagttttgagtggtgatagagttttagtaagattattaataactaagcataaacatagtgttgttcctgttcttatttctggtatcagatctccaagaagttcaagtaatgatgagcaaggtgaagaatatggtgatgaagcaaaggaatttgttgagaacagacttttattgagatctgttaaagttgaacttattggagaatctttaactggtgttttagttggtaacattattcatcctaatggaaatattgctgaaaaattattacaagaaggtttagttgaggttagtgactggcaatcatccttacttggttcaaaattaatgtcaactttacgtaaagaagaaaaggaagctcgtcttgcaggtaaacgtatttggaaaaaacaagccgcattatcttcaggttcatctgattcatcaaaatcagttggtgaaagatacactgcaactgttgccaaagttatctcctctgatactgttgttttaagattaaagaatgatgaagaagttaccgttcaattaatttcattaaaggctccaagacaatctgatcctaccacatcaccttttatttctgatgctaaggaatatgctagacataaacttattggtaggcacgttgatgttacagttgaaggtattagagaagctaatgataattatgaagaaagatcattagtcactgttagaacttcagatggtaagaacattaatgaagatattgtttctcacggttatgcaagtgttatcagacacagaaagggtgatgcaaaaccagattattgggatggtcttattgaaactgaagcaatggcattaaaagctaagaaaggtatccatggtaaaccaagtaatactggtaaacttattgatgcatccgagaatgcacaaagatcaaaaccttatcttttcacttttcaaaatagaaatactatctccggtttagtggaacatgtcatttctggtacaagattcataatagttttaccaaaagaaggcgttagacttgttttagttttaggtggtttagcaaactcaaacaataaagatagtaaagaatttaaattagctactgctcttgctaataaaaaattatatcaaagagatgtcaatattcaaatttacggtgttgataaagttggtggttttattggtaatatttttgttcctccttcaaatattccattccaagtaactttactgaatgaaggtttggttgaacttcatgatagatcagtcaatgagaccaaatttgcagctcaattacaaaaagcagaagcggatgcaaaagctaagaaaattggtttatgggaaaattatgatccatcagttgaagaaaactctgctgaatcattagtcaatcaaactgaaaacctgaaaattgaaagaaaatatcttaatgcagaaatttgtgaagttctttctaatggtttagttgcatttcaaattattgattcagataaggaaaaattaaaaccttttatggctaaatttcatgcagcttctccaaagtttgctacagtttcatcagttaaacgtaatgaatacgttgctgctaaactaaaggagaattctaaattttatagagcaaaggttcttgatttcaatagagctgatagagaagttaaggttcaacatttagattatggtaccattgaaactattaagttatcagatgttcgtgctttacctgctgaattttcagtttctgtatacaaaccacaagcacatattgcacaactttctttaataaatatgccaccaagaaatcaagaagattatttcaaagaagcaatctactacttagaagatacattattagataaacaagttgttgtatgtgttacctatcaaaatcctcaaccaggtgttgagtatgatgttgaattatatgatccagaagttattgctactaatcctacacaaactattaataaagatatgatttctgaaggttggggtttggttaagaagaaaaatttaaaaccatttgaactattactcaaaagggaacttgaagaagcaactagacttgaaaatgaagctaaatctgcacgtattggttgttgggagtttggtgatgtcgaaggtgatgatgatttttaatcttttataaataaaaacgttaaatagacacttttatacagaataaaattaattacttcagtgaaaagaagttttaaatgattcataatttattaaatacatgagaacttttggtgaattaactaccaaaagaaaactataaacaagctgtataaataaataaataaaaacgtaaacattataactgaaattcaattttctaacaaatattatctagattattttttagagttcttcttcttattgttcttcttcttctttttgccagaacttgaaccatcaataaacgcaacaatatcttcaatgctcttagcagcaatttcagggtttggagaggtttgtttgctcttttgaacttgctttgctttaatattttgttgttgttcaagtcttctagcttcttgttctttttctaaagatcttttagcttcagtcttaagatgttgaatgtaatcctttaaaccaagtgaaaatcttcttgcatcgattgttgacttatccttcaaacctaaggtaactttataagcattgaatgattgttctgcaacttcagaagccttttcatatttcttttcacctaaatataattgggctaattgatttctgaaaaatgctgattgttgactgttttgagtatttgccttatcacttaattcaattgccttttcaaaaatttgaattgattccttatttaattttaatctcaataaaataataccaactgatgcaaataagtttagaacatttggatggtattcatcaaatgctaaaatccaatatttaagtaatctttggtaaatcttaactgcattaacaaattgatcatttactatgtaagcattagctaattggttcaaagcaagagatgattgaaaagaatcaatacctgaacatctttcaaaaattaaaaatgctttctttaataagtaaagtgcaccagagttgtccttagatgatgagtaaaggttacctaatttagtaaagtatgaagcagtaatattatgaactggaccataaagtctttcacagaattgaactgattgattagcataaatagaaccttctttacgttcttctaattctgaacttgataatttcatcataccattatcccaagcatcgctaattgaagttgcttcgtaaactgaatttttaacaagtggaacaacacaaacaatatcttctggagtaaaagttgttgtaactaaagtttcagtttcttgaactggtgcagaagctgatttcttgttcttcttacctggatgtttatcatcatgtttcttggttgatgaatttgcaatttgtgattcaagtgcttctttagtgaatgcataatctctctttttccattgaataccaaatttaagagcaattgatttccaaagagtgaaaatcttgactgattcagtccagttttctggtaaagtgtatctaaatctaacataaacttccttggtaattgactcaataactgattttgaatctttttctaaaattgataagtcaacatctgagtaaattgaacttaaagtttcatttaatttaggagattcagggttagcgttaacagttgaggcgagcaaacaattgtgaacatgactgataacataaggagcaagtggaattggaattggagcagtttcttttcttaagaaatgtttagttgctcttgcaaccatttcagtaatagaaatcttgtataatgaatctaataagttaggggttgaaatagtgttcaatttggtggttaattcagcttctgcagcttctttttccttttgtaatctttcttcttcttcaagttctttcttaatatcaggaattggttcgcccttttcagcagcttcttttctcttttgaataatagcttcaattcttgctttcttttcagcttgttctttttcttcagctttgataacttcttcattaattttttgaacttcaccaaatttagcttcttgttccttcaaatattcaatttttctagcagctgctaattttgcaatttcacctaagtatctaacattaataccagattgatgaagaagggtagttaaatgagcaccatcgatagcattataaacttcagaattttccatttctttaacaaattctggaactaaaacttgaccaacaaatttagaaacttctctaaccttatcttcgtctttctttaattcagcagctaattctggagttggagctggtgataatgagaaagcatcaggatttaataagaaaattgaatcatcaataccaatagttggtttattctcagtatcaattttaccttctttttctaatttttcagtttcattcttaacagcaagtgcagtttctctcttaatccattcaacaattgcttcatgtcttaaaacggtttctctatgaggatatgaatcattctttgatacatcataatttgcttcaataaattcaatatctaatggagtacttctaaataaatcaataatatattttctaccatcagtacctttagtacctttagtgtaacctgaagtgacaacatcaacaactttagaaccatcattattccatattttatgtggttttaaatggaaacattcaccaactgctttaaagttttcaacataatcttcattagatgcaacatctgagtgatcatctatgaaaccatatttaacagtttgttgaatttcagaatcttcagaaactggagcatctgagagaatacctggaacaggagcttgacaaagaattctttggcctaaataatcaacaacggtagttaataaagtatgaacacctggaatatcatatttatttaataatttaattgaattaacatcctttgaagctgaagctctagcagcttcatcaccaccagtattttggaattgaaagattgaatcaattgcctttgagtagaaaataccatttctatgataaatattgaaagctggatcttcctcagaattaactggatcaatttcacctctaacaatagccattgcacctttaattgcagcagcggtaaaatcggtacttgttgaaattaaattagtttctctaccgaatttttgtgcaaaattttcatttggaatatctttaatgatttgataattattattccaatcaacttgtaaatcagcaccatcaataccaccatgtaataaattaaattgagatttacctaaatctggagttggtgttggtaattctttaactaaccatggagaaataatagtggtagaatttggaacaatgaaagtatcagcaatatgagttgaagcaaattcattattaatattgatttgtttttcaaataatggagagattgactttaaaagtgagattaatgaataatttgaattttctctacctgcctttaaagtactaatagaaccattgaaaacgttattagttgaactatttaagaagaaaccgctaacatgagcagtaattgataaatgttcaccttctaaagtttgagcttgtaaatagaataaatcacctgataatttttgagaaagattagctggagaccattgagaaacaaataatgattttaatgcaggagatggtttaatatttggtttagctgcaataatatcaatattatcatcaattttgacaatatcattaacgatattagataaaatttctttttcttcatcagtaattgatacatccttgtgttcagattcatcatcgtcaccttcagtagattcagattcttcatcaacttgtttatcagataactttaattcttcaaaagtagaagcaccagcacagacaccagtaatttcttcgaatgtatcatattcagtttctaataatgcaatttttctagtttcaataacatgttttctagcagtaatttcattataaggggatggaattagtgaaatagtaacagaatcttcaccatctttaattaaatcagcaataggagtttcatcattaattttttgatttgaaattttcaaaatatatgaagtaaattcacgagttgaaggaagtaatttaagtgtttcaattatatcaaataatgaatcattaattgaacaaggaatatctaatttttcttcagtatttggtaactgaattttcaaactgacgactctttcctcaacaggaagattctcagaagtatttgtttcactcatttgttaataatacaaaggggtggatacctaaaaggagagatttcaaaagagaaataagtcaatccattctgatggaaacttcgtcgagttaaaacgatggaaatggaaaaaaattgtgggaaagtggaggttgagcaccgcctgaaaaattttgtaaaagatcgatactctttatacactgaaccgataccggacattggtataagttttaaaagtattttattgtattgtaatacagttatgaatatatacactatcttatattatatattatataatttaatctacccttatttgacggtacatgtgtaaagttaaatataatgaacttaagaaaccaacagtaccacacattaaaccaatacaagcagcaattaagaatgaataaccaacatataaaacaattgaagttaaaccaccaagattaagttttgataaaataattgcatgtaagaaaacataaattgatataccaccactaacaaagaatgatttccattgccatttataattttcattacataatgaaaaataaattaataaaagtgtaactaacatacatgtaattaacatcaaaatgaaacaaaagaataaaaatccaaacatataataaattctattaaaccaaagtgaattatagataaaatacatttcaattgcaattgaaccaaatgggaaaatacctgcaattaatgaaaggtaaggagttttcatatattttggttgaggtggaatttgtctaataatttgattaactttaacaggtaattcaatatttttcttttttaaacctaataatgaaccaatacatgataatggtacactaattgcaaaccaaattaaaacaattgcaagcattgtacctgcaggtacagcacctgaagaatttgcaaatattaagaaaaaattaattaaaatgaataatgaaaaaattaaacctggtattaaaattggtgataataacatattaattttccaatcttcaccttgaaaaaatttataaaagaaagctgaataatatgaaccaattgaaccaaagattgaatataatataaacataacagttgctaatgaacctctatttgaaggtgataataaaccaaatgcagctaatgcacaagtaacaattgacattaataaaatttgaatacctgaacctaataaaactgataataacattggatttgaaggagatctgaaaacatcaccataaattaatttccaacccatttcatcaattatatcatcatctaaattaacttcattatatttttgaatatcatttttcaaatttttaaataaaatatgagaaattataaatgataaaataatgacaattaatgagaaattagttaatgcaaaccattgaatttttggatcatagacatgtaaatattgatcccatctagttgcccaaattaaatttgaaggaacccaataaactgaataagtgaaaataacattagttgaatcttcagttgataaattaattggattatcaatatcttcattacattgtaaattatcaattgaatcatatttaattgatcttggattaactgtaacaccaacaattctataattaccatcagatcttaaatgatattgaatgaaaaaatcataatgattatataaataaggttgattagttttatcatcatcataaccaatattaaaacctgaactataaaaaatttcttcagttttactatcaattaaagttcttgcaacaggtaaaccatcgattaacatattaaattggaaaccagctctaatattatcattaacaaattttgcatcattttgaggataatttgattcacataataaattacaagttgaattttcacctaatttaaaatcaaatggagaattgaaaattctatcaccaaataagattgaacctaaagattcagattgtttttgtttaccatcaattggttgacaaaaatggaatttatcaaaataataatcataagaatagagataagtttttgaattttcatcttgttttcgtaatgaaggagttatatgattaacaaataaatcaactttatcaccttcatgataagaagttggagctacaccaggtaaatagaaagcatttgaaattgataaattattaaataatgaaatgacgaataaaaattgaattaacatatttgataataatgatctatctttaataccattattcattatgatgatatttaagaagattatatctattatattagtataagagagtgtataagagaggataatatgtaaagtatttaaaaatagaaaagatgaatataatttcaaaacaaaacaattgatattatttcaacaacctcaattggaaaaaattataattataataatagtaaaagaataaaaaaataatagcaccggttggtttcgatccaacgacatcagggttatgagccctgcgcgcttccactgcgccacggtgcttttcttgcttattgaaagtgaacggtcgaggttcgtcgttggatctttaatttataattggaatgtaatagttaacaacgaccgatcctttcttaaacttgaataaagtattaattaagttatagtctagttcttattaaaataaatataaataaatataaataaatgtaatctaattaaatgtaactctctacttttctatgtaatataaataaggattatatgtaaacttgtaactcagtatctaactggatgaactggtgtcttttagaagtatctctaaatagtattattaaatgttgatgttgggaaagtattccaatatttatatttctcataaccttctctctcgcggatgatagaactttctcgaatctattccaaaactattataatctttctaacatgatttctatatttaatattagttattcgagtattccaaatatagtaattaataatcttatttcccaaataagtaattcgtaatcattcttaatcattaataacaattcacaaatgtgtaataattaaaatataagaaataacaagcatccgttcatttacattacctcgcttctcgggaaacttcgtcctcgaagttcaaataaaaataacttctaaatatcttgaataaaaattataggacaatttaagttgataattaatcttgattcataactttaatattcaatatgtgtaacaatatggaaatagaaagtaaattaaccaaaaataatgataagcaaaataatgacaaaacttaagataattgtaataattgtagatgaaataagatatcagacttctttgataattaatgacaacaatgacaatagttaaatgaataatagttctgataatgatcatctgaaatataatataataattttcttaaaagttgataatgataaggacactatttgtaataatttatctgagataaaaatgaaaatatcttgataagtaaaataataatatcttgacaaaatgattaaattggaaataataatggttaaatataatataattgtaatgactgtaatatagtttaatcaacaataaatagataaattaatcaatgcttaataataaataatgaaatgacaataatgtgatcaatgctttactgtaattatgttaggtaatactcatgagatgataataatataacacttgtaaatataattgaaatacgtttagaataatgatgatattgaaatgataatcaaaatgtagtataataaacataaacttgtattatatgtatgatgtaataaactaatgataattattgatctaatattaatattaataacaagtaatcctaaaataatatgaaatgagcataatgtataataggtgatacagcataatgatttaatagtaacattgagataaattgattataataacatgttcagatagtaatcataatataattgtcaaatggaataaatatgtggaataatgaaatgatgaaatgatctaaattgtaattgtctaagaattaattaataatatattaatctgataatatctaatggtaaacgatgataaaatgaggataattgtttgaatataaataactttctaatgatgataaaataaatgaaataatgtttaaatggtgttgaaatgatgttgaaatgatgttgaaatgagaatatattaataataataatttaattaattaatggatataataatatcaataattcatggacataatttaaagtaaactttaattgtgttttagtaatataatttaagaacaatatagatttgatgatgaggtaataatgaaatcttgatggaatagtataattcaaataatattatgatgataaataaagtaacaatcaggtaacaatatgttaattgtaaaaatctaaatattcatataataataatatcagaataatgtaatggtaatcgttggagtaatcagttgataagtatggaattattcaatgttaagcaggatgttaattttatgatgctatgatgataatgtggtaataatatgatgataacatgatgataatatgatgataatatgatgataaataatatgataataataatagagatagaaatataacttagcaacgatattaattatgatgtgttaatgatgtgataataatgtaattataatgtgacgatggtgtaataacagtgcaaacatattaataagttgatgaaataaatgtagtaaaatgattgctaaataaaataattcttttgagtgacataataaactttaattgttctaattgttaaataatgggacaattgataattcatataaatattgacttgagagtagagataattttcatagatggttaatataataataatttgataaataatgattgatacaatgataagtaataaataaaataataattgagtaaaataaaataataattgggtaaaataaaataataaatttcaattgaaaataatgttatgactagactcttcattcgtgaaatcagaatggtaaaatttttaatataataaatatgatgaaaaataatagattgtaataaaaataatatttcttaatgttttaatagttaggtaaaagaacaagttgtgtatttccaatcataggttaatatctaaatttgtaacaatgtaaaacaataaattgtaataatatatgattaataataaatttgaaatgttaatcttgagatcttattaagttgagattagatacttaaatctgacaaatgataaataatataatatttgaaaattcgaaatttataatctttttaataggatggaaataatgcatgctaaaaatattattaataattgtgttacgatagatactgtaaaaatattgagttgaaaattcacatgaagtatagttttttataatattgtaattaaattaatattgatttaaataaattgtagtttgtaaattctaataagcaatgatattttttctttcttttataacgataatcaattaaataaggtgaaatcactaatggattataagtaaattgtgagataaaactttgacatactggcagagatataggttcaattaattggtctggaattagcttaataaaatgattaatataattttctttactttcactgagcttcaataaagtaggacttgttggagtatttatagacaaaactgtatttgttaaatcataaatttctttttcatcttcttcaaattcatctgcagtaaaatattcagattcagatccatcagtcggatgatcattataattaagttctttcatattagtattttcagatttgaaggcaaaattgtttggagattcataagctatagtgtttgtatcttcataggcatttataatattcatatgttcatgggtgataatatttgtggattcattaatgtttttatatattgatttcttattgtgattggacttttcttcaatttcaattgtattaaattctaggcttttattcttttctaaattttgcacttctaagtcttcattaataatagtaggtaatttcattatggtattttcatttgtttcttcattattagtaattatagtagcctttatcttattctttcttttagatgttttatttctattaatttctttataatgcattggtaaatctatcttttgagtaaatgtttcattatgtgcatatgacttattataattatatgattcttcgtaattgtatgcatgtaaattattgtaattatattctttatattggtatgcatgcgatttgttataattgtattgattcttgtaatggtactcgtggcggcctctttgctttacgtcacggtctctgttatttaaaaattctttaatgcatctcatagtataattatcttgattatttgccttgtcgtttgtaatacgttcttctttataaaaataattttcaaattctttaatgaaataatcccatgttaatgtagtgatatcaaaattcttgttgagaaaccaacgtaatgttttgccttctaaatgattataaatgtagtatatcttgtatgcatcaggaagttttccttcttttaattctttatctgaaaaatgtttattgactctgttaataaaattgattgcaccttgacccgtgatgtcgttttcacctgaataaaagtatgatctatgagtaattatatcttctaaattagcaaacatgatgagctcttaaatatattaaaataaaatatgtgaatgtaatatgccttaaaaataatatgttaaaaatatagtgtgccttaaatgtaataataaattaatgtaatgtaataattgatctgtttgaataatatgtagaatcagcgtgtttctgctaaaatgattctaatgtaaataatatgtaataattgtaaattctagtaataatgattaataaataggcaacaatggaagtaataaatttaagtggtaaaattggaaaataaaaataatttgttttgagtctttaatgttgctgaatagtagatattaattaatgataaataaattgatttttaattttgtattttgaataacttgaacttaaatgtaaactaactttgaaataataaatttggataacttgaacacttgatttaaattctaattctttctcttgattttctaaaacggtagtttaaacaacactaccggtgctaccaattgaaagtgaacggtcgaggttcgtcgttggatctttaatttataattggaatgtaatagttaacaacgaccgatcctttcttaaacttgaataaagtattaattaagttatagtctagttcttattaaaataaatataaataaatataaataaatgtaatctaattaaatgtaactctctacttttctatgtaatataaataaggattatatgtaaacttgtaactcagtatctaactggatgaactggtgtcttttagaagtatctctaaatagtattattaaatgttgatgttgggaaagtattccaatatttatatttctcataaccttctctctcgcggatgatagaactttctcgaatctattccaaaactattataatctttctaacatgatttctatatttaatattagttattcgagtattccaaatatagtaattaataatcttatttcccaaataagtaattcgtaatcattcttaatcattaataacaattcacaaatgtgtaataattaaaatataagaaataacaagcatccgttcatttacacttatttaggggtttggttatttggtgctgttggtgttataatttccggaataccttgattttcgacaagacgtaattctgtataattatagttttaatatttacttgtcgtaacaaggtagtgattaatttgtaataataattcttgataaataataagtataaaataagtataaaataatgtgtaaataatagtaataataataataaatgtaataataaaataatggttgcttaatttgcatataggataaacaattactttagcgacgcgtctcatgggatcttaatcagaataccataatacttacctccccgaaaaaattgtatacccccttctattcaaccgtgtcaaaagtttccttgaaaaattgtctttcttgatccccaagtttagttgaaaaatcagcaattgatcttaagggagatccataatgttgaaaagctggtcttaaatgcataagattatgagtgttcttcataactttaccatcatgtccatataatttataggcatttttatctaaaacttcagcaactacaaacggaccttcgtaagatgggtcagttttagttttcttcattgacttcttcaagtaaacaaattctatctttgaaaaacttttgataaccgaaaaccaattcagcaggtgaaacgtcaaaaattgtagttgaattattgtaacagtttaaagcatacatcagaacatctggccatttcttcatggtaatagtttgagatttaagtaacttttttaataatccattgactctttcaacctttgaattagcctgtggataataaacactagaaaaacgccatttaatatcaaatttctttgctacttcttgagtataataactaacaaatggaccaccgttatccgagacaattgtttgaggtactggaaaataaacaaacagatcctttaaaaatctaataactgtatcggcatcttgactttcttcaggagttgcaatacaataaccactaacatattcaacagcaactaacatgtatttacaatttgtttttgtctttgaatatgtgaccgatttcgtaggacctacgaagtcaatatgccaaagttccccaaaatttggagtcttcacttcttgcataacagcaggtaattcttgaaacctagtaaacaaatcacaatgatcacaattcttcacgacatctgaagcaattaattgacaacgtggatgaaaaatcctttctaataccatcaaatccattaacaaatttggagttccatgatgttttctatgccattcttcgaatagttgaatgcattcaccggccttgatcaccttaagcaacaaattttgatgaataaaatataaaacatcatccttaacaacaaataaagaaacaagtggttttaactcatgaaaaattttctcacgatcagaattttcttcttccattccctcgacatcaggattttcaattaactcggttaacatctccaatttttcatctgatagaccaccgaaatttcgaacttgttttgattgaaaaataatcttgtcctcctccatttcgtcatttggaaaacgaactgcacaacattgaatatgatcaatatcaagtaatggctgttcagtaattgaaaaacgacttacaaagtcagcataattcgtatttcctggaatatatttaattgttaagggatatgtggataaaatctctaaaaatttcaaaatcctattgttcaaagcacaattcacttgattgattgtagctaaagccttgtgatcagtaaaaacaacgatatcagttgaaagtaataggtaattgtgtgtcagtgccataataatacctaagagttctcgttctaatgttgaatatttctgttgtgtgaccgtgaaagacttagaataaaaagcaattggaattaacttctttggatccttatcccatttttgcagaaaaataccaccagcacccagatcactagcatcagtgtaaataaacagagtttcatttgggttaaataattgtaatccagttgaattaattaaggcctctttaataagggcaaaatttctatataatacaccttcctccacagttgaaatagtttttgactttaaacaagaatgatgttcatacaatggtttcaataataaagcacaatctggaatgaatgcacttaaaaaattcacgaaaccaatgaacttataccagtctttcattgttgtaggtaatttccagttcctaatggtcataaccttctcatcagttggaaatctcttaccatctttgattaaatatcctaaaaattcaattgaatcttcagccaatttaacctttttagctgttaatgttaatccgcatttgtctaattgtgttaaaattttatcaaccaaatccaaatgtgaatccttaccaactgatgcaattataatatcatcaagataacaaccaacataatgtagtttcgagtcatactgaatgtctttgagaacaaactgcataaaccttgtaaaaactgctggagcactagctaaaccgaaaggcaaccttttgtattcaaaattaccaaattgggtggtaataccaattctagcaccattttcatctaaaggaacattaaagtaggcactcttcaagtctaatgaagtgaaatgagagtaaccattcaaattctggattaataattgaattggaggaatcgcctcagttctaaactttaaagatttattaatttgtctaaaatctgtgaccactctaaccttatcatgttggatgataggaaaaactggtgctaaaacaactgaaccatcatcatcaatatctgatagaatattgttatctttaccttctttgatgaaatttagcacatgttttgcttggatggaattagcataaaacggtttaggtttctgataatcaaagttttctaattgaaccttataagtaaaaccgtgtgatggacttttcttaatagtatctttaaataattttggaaattttaacataatatcttccaagtatggtgttgttcctaactcagttaagctaatattctcgtcaccacaactaataaaatcaaaattcgatgtctgaatttcttctgttccaaaagttaaataactatggttctcatcaactctaaatttataataacctaatgaacccctaccaataattaattttggagtaccgttggcaggtaataataaacattttgcatgtaaaacaaattcatcaaaattaacatctaaataaaccatttctgaacaaacttcttcatctcctagagctgctttaactttataaaactttgataacttaaccttcttgataaattttacccactcaggtaagttgtccaaaaaatctttataaacaaaatcaacaactgcaccactatctaataaaacttttctttcttcattctgagttctattatttcctaaatggtaaacatctaattcgaataatgaaacaatgttatcgatattctcatcatcatcattttcttcaccttctgaatactgatcatcactaacatcactttcgttgattcctaatctttgttgaatgtttgaaaccaatttttcactatcatcattaacgtcgcaatcaaaattgcctccatcatgcaccaaatcaattgcattaatgttcttacgacccatgttaccattcttcttaccatgcttcttgtaggttgcaaagtttttggaacagtttctgcaattacaattttggcagaaatgttgattcttcttaaaacgattgggaatacccaaacgttttctttccttgcagttcttgcaatgacactcttcgcaccagaaaggattaacatcgtttgatctcttaggatacttcttttgattgtaaggagttgttgctaaagcattcactttcattgatgaaaaagaatctggaatgcgttccatacctaatctagtatagataaatcttcttaagtctggtattttgtcaatttttgccagttcatcggtatgctcaccatgtctatgttcatataaatattttctcaaatgattcttgacacgtctttctccacctttgataaaagagtaggatacactcaaattaacccaatccatgtagaagtttctaatagaaccatcatttggatatgtttctggaaatgtgtccagttctgtctccttcatggcatcgtatttgtcaaaattaaatctagaaaatgtataacaaagcaattgaatgtaatcttggtattcaccagtttctgattctgggtaatttcttaaaatagtggttttgtagaaattacaccattttgtgaatggaacacctttcaacgctaacaattgttgaaactttttggtagcagttacaatttgttggtcggttggcctttttggtaaagcctcacgaatcaattcacttgcgatcttcgattcatccagttttccctcttggtaaaaaatttctttaataattcgattttgaagccaaatctcttcgaacatatatttttgaatattctttaaaacatcacttaacacatcgataggttcttcaacactgttaacactagtaaaattcctattgttagccatttgaagcttcttgtccatttctgcaagataatattgaaatctggattcatcaattctaacacctggggttgtttctgctgcttttaacttcttgtccatctcagctaaatagtactcgaactgagatgtgtcgatcctggttcctggatttgaccctgcttcttctaaggccttaattcttctgtccatatcatcttcaaaaccatatactctatcgaaaccatcttgagcagcagtttcaatcgctttctgttcttctgccaactccttttctttctgctctaatgcttcttccttttgtaacaacttcttttcgtcttcaactatttgatttaaggttttttcaatagcttcctccttcttgaacaatatttcttcatttttaagcaattgttcttcgtttttaagcaattgctcttcttctttttctatttttatctccttctctaacagtttctttgaatcatcgatgatttgctgttcatttgaaaagagttgctgttcattgccgaataattcttttctttgagcttccatttttgagttcattaaaagcatagccttctcaaccgcactatttatttgtgattgttgactttgttgcagttttgcaaacagttcatcgaggtctttaatgttcgacattttactgtaatataagtttttttttttattttttgttcttttatgtttttttttttgtgtttttgttaataatataatagtttgaataaggttttttttttttttatttatttggacgataagtttagtttggatttgttcttgaatttaatatttcaaattacttataaaaaatattttttataatttccggaataccttgattttcgacaagacgtaattctgtataattatagttttaatatttacttgtcgtaacaaggtagtgattaatttgtaataataattcttgataaataataagtataaaataagtataaaataatgtgtaaataatagtaataataataataaatgtaataataaaataatggttgcttaatttgcatataggataaacaattactttagcgacgcgtctcatgggatcttaatcagaataccatagtgtgttgctgacgtaagcagaaggtagatattgttaaatgatagtaaacatcaaaataacctgttttctcgatatttaattgtaacaaatttttacaattttaacaatacaactataaacatataattattaaaaatatttttccactattattaacataattaacaatttgataaaaatatctattaaacagtctacaattactactgtgatgagttatagatagtaatagcaacagccatacagtacaatacctggtccaatactaacatcacttataccctatacgagtatacgatacgatacaaatacaaacacaacacattacataatcaaaaaaaataagcggaggaaagtgcctgttacgtaatactaattaaatactaatactcatattaaataagatcatttattaaattttattaatttattataatacaaagtggggccatttatataatatactactaactattaagtattaagtatttataccccctctatttattataattttattacgtatttgctatgggcatgtacaccccgttattatgactatagtataagtatcagtatttatatttatatttatatttatatttatatatttatactgatgtgattttcctgtttttgtatttctaattttaatcttagtatattatcatctcttcttttaatcaaaaaatgttaagatcactcactaatcaagcttcaactggtcttaaacaaggtcaaagagtttcctcaaaatcaagtaaatctttcactcaacatcaatctcaacctcaaccttcaactcaaactcaatcaaattatttctcttcaaatgctccattaaatactactaatactactacaacaacaagtagtagtactagtacaggtacaaatactacttcaaaatcaaaatttttctcttctgctgttataaatgctcaaccttttgaattacatcaaactcaaccttatattacaaataataatcttaataatttaaataatttttccaataataatacagatcatattcaattagcattatttgatgaatgtttaaaacaaaattcaacttatgatttagcaactggtaaaatttcaggtggtggtgtaaatcaattttggttagcaattaaaaaaattataccaatttatagatctttaatttattcaaatcaacttaatgaaaagagaatggcagattttgtttccctcttaagaaatggtttaagaattcatcgtttagaattatcaaaattaaataaaaatttagataaagattcaaataatccaattaaaaatattcattatttattaacttgtgcaattagagaagtttcatataatttattagatggtttaatttatctaaatcctcatggtttaactcatcttttcaaagcttataaagatttaggttttacttatgaagctgttcatatttgggaaactggtaaaaatttaaatcatttaaaaaatttatttacttcagaacctgttttaggttcaattttcccatttttagtagaatctggtgattttaattttgatgaaatttggcaaatgtatttaaatattaaattaaataaaaaaattaatgaaaaattacataatgaattacaaattggtatgattagagtttgtcttttcaaaaataaaaataatgatgctttaactatttttaaacaattaacttcagatgtttataattcatttaatttaaaaggtattgaacctccaattaatataaaatcttatatgacaatggcacatttatcatttattggattttgtaaagatattaaaactgctgattattttttcatgaatgcagttaatgaatcgatgccttatcttactcctttacaattaaattttattaaaaaatatatttcaaattcttgggaaattacaaatgattttgaaaaaattaagaaaatttggttaattacttggaatcattatgaattgaaaaatagttcaaattcatcagtttcatcatcattaaatgatgcatttttatcaatttttttccaaaaatatccaaattttaataatgaatcatttaatgaattaaaattaattattaatgattattcattaattagatcaattgatgaaccttttattaatgttttattatcaaaatcaactatttggcataattctgaagttttcgaatatatacttaatgttgcaaattcaaatccttttatgaaaactaatgttttctatagatgttgcttaaaggcatgtggatcagttgatttagattcaaattcaattttatccctatttagacaattattatcaaataatgcatcaaatggtatgaaatttattgctcatgcagattgggttgcattaagagatgcaacaattaattcaccatttttattaaattttaattcaattaatgatagaattgatttatattttaaattatggaaaatttgttcatcaagttttattaatttagaaaattttaaaaattatattttaaaagatattaaattaaattttaattattcaaaaattttccaacaaatgtcaaatattaaatcagatattgaaatacctgaaattaattattttattaaaaataaatcaattcaaaattatattagtaatggttatgcactcaattaaaaattaaaaaataaaagttcatattatatatatcattcatttcccctaagctttcattttatcatacttttcaattctacaggttatatttcatttttcagttttcaatttaattcacttttcattaatactttactttactttactacggatacttttataatcataatttatttactaactctatatattattatacacactactatatatattcactctatttataataattaattcaattcaattctactctattttatatctaagcctgtattgtataatttgtatgcactcggcatgtagaaaaaatataaaatatccaatcccctgttctttatcaataactctttctctttagacaatgtcacaacaatcacttcctaataaaccattacgtagtgttgaatataaaatagtccttttaggtgaatcatcagttggtaaatcttcaatacttgaaagattacaaaataatacttttaatgaagataaatcatcaacaattggagctgcatttatttcaaagaaaattccaattaatgaaaataaagatttaattaatttacaaatttgggatacagctggacaggaaagatttcataatttaactccattatattatagaaatgcaaattgtgcaataattgtatttgatttaattaatttagatagttttaaaaaggcagaatattggattgatcaattaaataattatattgaagaacaattaattggtattgaaattatattagttggtaataaatgtgatttaattaatgaaggtgaagaatgttcatatattaatataattaatgaatttatatctaatcataaagaaataaagagatatttacaaacaagtgcaaaggaaaatattaatataagtaaattatttcaagatataattgataatattgatgatgaaatgtttcatccaattgaagaagaaaattctaaaaatttgattgatttaaaatttaaaaaaaattcatataattcaacatcttgtcaatgttaagattgaattatataactaatagagtataaaattaagttgaatataataattaatgattcaattttaattattgtaaatgatgggttccctaaataccatccaaggataatgtattgaatataggagagataatcaattgtgatgtttaatgtgaatattatttaatatgaaaaggttgaagattatcccagtcaacattatcaatgatgaataatttgcaataatagttgtacctttacttacttctatttcttcctcctcatccacttcatttttaatatcattttcaatattattggtatctaatttttcataaatttcatttaaaatttgcaatattttaaaagtatctggtctatcatttggattattagatactaataatttaattaattcaatccaatcaattaataaaatatcaggattttcaaaattttcacttaatgatctaatatttaataaattactaaataattcattatttaaaatttgatttgaaatatcatcatcattaaatggtaatttactaaaacataaataatataaaatcatacctaatgaataaatatcacttgaataactaaatcctccatatttatccaatggtaaattattttcattactatatttcttcctatttttacgttgtttaattatttcaggtgcacaaaattctaatgtaccagtattaccagttgtttctaaatttatattaaaaaatgggctattattattattgttattattactaataccatttgtttcttcaattgtattaaccataattgattcaccaaaatctgaaacaaccattgttggaattttatttaaatcatttaaattaattattggattattattataattttcattaaattttgtcttaaataaacaatttgaaggttttaaatctctatgaagtattttcaaattatgtaaataatttaaaccttgagtaatatcattgaaaattttaaaaatttcaaaattatttaaatatcttgattttctataatttatccctttctttaatcttctccataatttttcatcattaattgaaaattttggattaattaaattttcaacaaattcctctaatgtaccaccatcacaatattcaaataataagaaaacaactggaattttaggtgaaaatttagaaatttgatcaatttcaatccaaacgtgattatatttaacaacattattattatcaattgatttattattttgattatttgaaaaattataactaatatcatataaaaatttaacttcatttaaaattttttttaaattttttaaatcattaccaattggaattttctttaatgcaaatatacctaaatttaaacttaataattgatgttcaactttataaactgaaccaaatgatcctgtacctaatttatttaaaattttgaaaaatttattaaaatatccttgattaattaatttttcaggtattgattgataaatttcatcattatcattatcattattatcattaccaattgttaaaaatttaccatttgttttattattttgataatcttttaataaatggaaatattctctactaataaaagtttcatcattaaattctggaattatagttaatggtttcttatctttatttacttcatcaggttcattatatgcaccacaaacatgacatctaaacttatgtcttatattagattcatcatcatcatcatcatcattttcaatatcattattaatattattaccatcataatcatcttcttcattattcggaattgaattaacaatttgaaattctctcttaaatggatcatataaaaccatttgttcagaatttctatttttataaactatcattgaaccattgttattattaatattttgattatgatcaattgatagttcattattagatatatcacttatattagaattataccgtactaatgacatgtttgatcaaaagaaagcaaaaaaaagaatagaaatacttaaagaatcatgttatgtgtcatgaagtccgagggttaccgtatatttaatatttcaatgattacataatcatatacatacataataatctaaatatcgaataaatatgagttaatatcatcaagatcatcaggtttattgttaatggggaggtaggatagattattgaggtctaattgtatgagttgctgtgtatttaaattgattgaattatcattgtaatcatcttcatagatattattattactataattattagtattactattattatcaggattttcatttctttcattaatttcatcaattgaatcatcatttaataaattattatcctgtaattcaattatttgttgcattttaataatcatattctccaaattatttattttttcatcctttgattttaataatttatttaattcaattaattgattttgtaaattattaattttttcagatttaattaaattagaattatttaattgtaatattttttcatctttatcaataataattttttcatattcttttattcgttcattataattatttttcaatttaattatctttggtttaattacttcaagtgtgttttgtattggtatattattattattattatcattgataggtaacttaaaccttacattgggagaagaatttgaatttgatgaagatgattttattttagaattattagaagtatgaaggagattatgcaatcgtttcctatattgtacaagattatcaggtgaatgtgacattgttgaaggggaggtataagaaatagaaagtgttagtaagggtatattatataaaaagtaaacaattttttttccattatggtaaaacgagggtagtatgaagtaaaaaggattaaattattatattatagaaatgattataaaacgtagaaagaatgttaataaaaaaagggaatgttagttaaattgatatattaataggttaaaggattaaacagtatcatcatcttgtttttcctctgaagtttgatcaggtaaaggaactgaattaatatcttccttatttgccttttgaggaacagcctttgatctaacaggttcagggatataaacatttgattcttgataagtaaattcaccaatttgagttgcatcagtacctaaatcttcttcttcttcagataatctaattttaaggaatgggattttattcataatattaagtataattgaagttacaacaaatgaccaaagatcaattgaacaacaagcagctaattgtaaacctaattgtctataattatgatttaaccaaccaccatcaataactgtaccataatctgatgcagcaacataatctgctgcaaataaaccagttaaaattgaaccaataaaaccaccaacaccatgtaatgcgaaaacatccataccatcatcaatatgtaagatatcctttaaatcaacagcataattacaacataaagcagtaatacaaccaattggaacagcaaaataaacaggaacaaaacctgcagctggggtaataccaactaaacctgcaactgcaccagaacacataccaatagttgtccatttatgaccacatctaaaccaatcaaggaacatccaagttaaaccaccacaggcagcagctaaattagtattaacattagcgtaaaaacctcttaatgaagcatcaccagaagaaccaccattaaaaccaaaccaaccaaaccaaaggaagacagtacctaagacaacagaggtaacggaatgaggtctatattttggaatacctttattagttaaaggatctcttcttttaccacaccaaagagcataagctaaagcaccaacacctgaagcttgatgaaccggtccaccaccagcaaaatcataagcacctaaatgatttaaccaaccatttacattccaagtccacattgcacaaggacaataaacaattgtaatccaaataaagaggaaaaccatcattggacctaatctagctctttcacaagcaccacctaacatgatacaaccagtaatcattgcaaacataccttgaaagaaggcaaatacgatatcaggtaaagttgcagcagcattattttcacctaaaacattcataaaacagaaaaattccaaagaaccaataaatcttgaatgagcattaccaaaagttaatgagaacccccaaaaataccattggaaagagataagacaaattgccataagtgaagcccataaaagagaaagggcatgtttttttcttgacataccagaataaagtaaaccaacaccggggatcataatccaaacaagggcaccagagaccataacccaaaccattgaagctccatcatattgagctgataaatcagttgtccaaacatcatttgaagttgtattagacatgattgatttagttagttagttatagtagaggaaaggaaataagaaattaataaagataataaacgaaataaaccgatactaagcaaaaaaaaaaaaaaaaaaataaagcagtgaaaaagagagatgattagaatgaaataaaaataaaaagcaacatagaaggatagcagagaaaaagaacgttgtgggaaatttacaagtatttataataataataataataataataaagataagtaaaatgagtaatacgataagaatatataagataagctgagaatacatgactggtaaataaataattagaccaatagataaggttagattaagtaatattaaatatatatgagaccttagctgattttaattttattttcaaatgccgcactgttactagtgtgtggtaatttattttatttattagaggattatttagaaaagacctaaagacctaaagacctaaagacgcaaagacctgattattttattttcattttatttttattttcatgatatccacagtttctttgaatttgaagaaaatctttaaaaccaagagagcgtccctctttttcagcgtcgactttaattctatatcttttgtttatcttttgtttattatttgtttaaataacaatgtctgatcctaattctgtatctaatactaataccagtactaataatgatgataaaatagatccggatttacaatctgttaatgttactaataataatattaatgataatactaataataataataacaatgatcataatctaaatgataataataataataacattgataataacaaagattcaattacatcatcaactgaaaataatattcaaaatccaattcatgatccaattcatgatcaaaatcaagacactactcctataaaatcaaaacttatctcatcaaataatgattcaaaaaatttattctcaaatcatttaaaaaatttaactgaaaatatttctgattccctcttacttattcaatctttattacctgaaattcatgaaagaaattcttatattaaatcttatgccttttatcttaataaattaaattcagaatttgtttcattcgatgattatgttaaaaaattaattcatgatcctttaaatgatattaataatgatttattaattgattcttttgataataataataataataatactaataatagtactagtactgatatagaaaatactacatcaattataccttcaaataatttaaaatcttcaaaaattaataaatcttttagattatcaattaataatggtcctcctttaccttttatacctggtactagaattcctgatattgatttaaataatcaagctaaaactgttaaagatatttggttagaatggaataatggttataaaggtaaacctgcattaaaattattagaaaaaaaatttggtactcgttggcgtcgtggtagaattgcaaaatctgctcaaagaaggaaaaaaattattgaatttattgaaaatgaatttagaaatcatagttcaattttaaaaaatattattaatgtcgtaaatgatttagataattatagaatttctaaaaataaaggtttattttggctttatggttctttacctgatagattatatgatgattcaggtataccaatttataaattaaataataatcaacaagatgaaaaagatgaacaaggagaagaaattaataaagataaggaagataaagaagataatattaaggaagataataaggaaaaagaaaaagattctaaaattaatattgataaaattgatgataaatcacaaaaattaaaatctttaaaatctaatactacatcttcaaaaatatcaaaatctccaaaatctaataaatattcaaaaattaataaatctgataaatcattagaaaaattaaatgataatattaataatagtagtatccctaatactaatactactaatactaataataataataataataaagatgatgtagaaattgatgatgatttaaaagcagttgataaaattaatgcagaaaaaattaacaacaataataataacaataataacacagaaattgataatgataatgataatgatattaatgttgatgatgtcgttaatatggatgttaatattgttgataaatttggtgatgatgataaatttgttgatgatgataaatttgatgatgataaattcgatgatgatgatgatgatgatgatgttaatatgccatcagttgctgatgttgccgcaatggctgcaatgtcaattgaaggtgaagatgatgatcatgcattagtcgattctgctgctttagcagccgctgcaagacatgttgctgctcaacaacgtagaagatatgaagaaaattcttcaaatgtttcaaataaagacaattaattaaaaaattatccaccatccaccaacttgtatttccttatttcaccccatccactatattttttgtaaatcaatttctttgtatattatttatttactatcgaaaaaaaaaaatttaatcattttttaaaaaaataacgtttgaaatatttgatataaaagagtagatttatttaaagtacataaaagagagtaataactttttacttaatttttatttctaaaatccaaatggattatcagctgttgcgttagctaaatttgcttgtctattggtattattgttagtattagaatttgttgaattaccaaatccaaatccagtaggttgtggttgtaattgattaaatgaatttgatggcataccaccagtcattgctggattcattccaaatgtatttggtggcatacctccggtgagtgcagggttcataccaaaagtattttgaggcataccaccagtcattgcaggattcatgccaaatgtgttttgaggcataccaccagtcattgctgggttcattccaaaagtattttgaggcataccaccagtcattgcaggattcatgccaaatgtgttttgaggcataccaccagtcattgctgggttcattccaaatgtattttgtggcataccaccagttatagcaggatttacaccaaatgtgttttgtggcataccgccagtcattgcaggattcataccaaaagtgttttgtggcataccaccagtcattgcaggattaacaccaaatgtattttgaggcataccaccagtaattgcattattaagttgcataccaaatgtactttgaggcataaatccacctgttttcattgttggttgcattgcaggtatactattattaacattaccaaatccattaccagttttctgtaatgtaataccagttggttgtaatttaattaaattattattattcaaattcatattattaattccaaatgaagtatttggcataccaccagtatttaatggcattataaatgcaccacctgtttgttgaggatttgcacttaatgaattaactccaaatgttgtaattggcatattattaccattacctgtaattgatgatttcattaatccaccagttaatcctgtacgtaatggttgcattaatcccataccagttggcatacttgtcatcataccagttggcatacctgtcatcattggtaccattgtaattggcataaacccagttggcattgccatcattggaacattacctgtcatggatggtaatattgaacctgtcttttgtgtaggtacagatgttgtaggtgttgttgttaatgatgatgatgggttggattgtggagttggacttgtaactggtgataatccaattgtatttattggtttaattggtgcaatacctgtttgagttggttgcattggtttaatatctaataaatcttgaattgaaccagtcatttgtgatgatgatggttgtggtggtggtgatgatatactttgagctgtaatattttcagttggtggatttggtaatggatctgaaatatttttacctaaaatattattattattattattaatacccaaagttgaatcaattttctttttaatttttaaaatatcaccttcacgaacacctaatgtacgcattaatgcaggtgtaacaccatctaaaactgtattatcaacttgttcttgtgcaaaatttctagcatatctatcacaaactgaaacatcaatacctgattcaacaaagaaattaaaccaataatcaattaaatctgcacgtaaaccaactgaaccaactttctgatgagcaattgctgatgaagtttcccttgatggtaaagaaggtgttgattctttaatttcagatgtagctgttgttggagttgcatttgttacatttgttgttgttgttgttgatgatgaagggtttgattttgatttatatttatctaatgaagtaccagttattttttcaacatattctaaatcttcagttgataatttattacatgcaacagcaattttaactccattaattttatgtaaatgaattttaccttgttgaacacctaaaaattctgcttcaactttaaatgaacccgatctatcaatccatgtacgtacacgatgagtatttggttttgaaaaatctttttccttattattattattaccatttgaattattattaacttcttcacgcatacgacgttcacgtaatctttcatcagcacgacgtaatttatcacgttgttctctatcacgtaattttaattctctctctttcatttcaactttacgacgttgtttctctaattcttcacgttctaattgaattcttgaacgttcacgtaattcacgttcttcacgatctctatctttagaacttttcttttcttttttaggacttttattattatttgaacctaataaatttttcaaaaatcctccattatttgaattatctttattattattaccactactaccaatactataaaaatcattattatttcttgattttctattatttgaagatgaagatgatgatgaggaaatcaatttaatataatttgaaggaacgacacctcttttacctcttaaattttcaaccatccaccattctttacttttacgatcattaataattaagatttcatcaccttcattacaagttaattcatcatcagctgcaccatcaaaatcataaagaattataccttttttatatgatgatgaagaatcagatgaattagatttaataccattttcataaccttctctttgagcttgtttaatatcagataatgcagattgtgaatgtaaaccttttaaatcacctaaaattgatataattgcttgagctgaatcttttgtaccaacatgtaattcaaatgaataagttggatttttaaaatctaagaaaacatgttttttttcaacattataattaattaaatcattaattttccaattttcatttaaatttttatcaatatctaaataaatttttccattaccaatttccaagatacctgaacgtttctttttaccatcaatttcatgaattttccaagcaaaatcaccataaattggtttaatttcatctttttcagatttatttgaagataagaaatttgagaaagattttttacttgataatcttgatgatgtggtgtttgatcttgaacgttgtttaggagttggatcgttgttattattataatcatcattataatcatcattataattatcattatagttatcattataatttttggaattggttttaggatttgaagatttatttgaaggtctagatggcatttgaggaggagcttcttcttcttcaggttcatcattaggttcattatatgaaggttctacagatttagattgactaggtctatcaattctttgaggtggaggtaagaatgaattagtagcattaatagcattagttgttgttgttgttgttgatgatgaaggatttgggaattgagttaatgatatattgttaggtgtattattattattattagaattattattttcattataaggttcaatataattagcaggtataaaaccaaattctttaccatttttatcaactaaagtccaatttggatctgaaatatcataaacattgaaaatatcaccttcattaaatgataattcttcaattgattgattattataatcataaagggcaattgattttgaaattggaattgaaggtttaatataagaatttggaactaaaccttgaggttcttcaatatcagcatctaaaactctctttttaactaaccaccaatcatcaaaattagatttttcaattaaataaagtatatcattttcaattaaagataattcttcatcattttgagcagtataatcataaattgcagtataaatgccaataaagggggcagacatgattgtgcaattgataattaaaagaaagatacaaaaaataaagataaaaatgaacaataaccaaatttaagtggctgtcctaatgtaaaattagtaggatatttaggatatatcatcgaattgaggtaattcctctactataaactaagcttttcctttatcttaattataaaattaaagaaaatattaaaaccgacgcaacgactcatgaatcacataaattacgtaataaaactaaatattacataatcaaaattaaaaccattacctaatcaaccattacgtaatcatgataaatctagactaattactaaagattttaatttaattaaacaccccttttagaaataaattgatctcatcacatcaattatttaaatcaatttattatatttatacgaatctcttagttatatttaagtaaaggctttatttatttgatttatttgatttatcttaaattgatttatcttaaattgatgtatcttaaaataatttaattgattgctattcttctttcttttattcctgtacccctttcctctctttcctcttgctcccttcttatcctcttcctcttcctctcttttattatggactttccatctcatttactatctacttctacttctattcctaattctaattctaattctaatcctataacaatgtcagattttgataactataataataataataataataataattattatagttataatattccggatactcccggtaatgataacgataatgataataatagtatcttatcattcaaattaaataataatttaccaacaataattgatttagatattactccttcaactccttcttcatcatctctttggtcttttaataatactaataataataatattaatactgctaacactaataatattactagtttaagaaattcatcattctctaatacaacaactccatttttaataccatctcctggttcaattaattcattttcatcaaattcaaatttaaattcaaatttaaattcaaatttaaatagattttcattaccttcaattcctgataataaaatcgattttaataatgattctttattattagatattaataataccactaatactaataatcaattccataatcatctgcttaattataattcaagatcttcaactagaagaaacactcttttctcaaatacttcaaatacttcgaattcttcaacttcaactgcaaattcaatctcaatttcaattccattaccttcatcatccattaataataataataatattaatgataaatcatctactttattatcatcatttattgatttagcaaatttgaaaaatttcgaaattattaatttatcaaaagatcaaaatggttgtagaatgttacaaaagaaaattgataatgatgttaattataatttaccaataatttttaatgcaatttatacaaattcaactaatttaatgattgatccatttggtaattatttaattcaaaaattaattattaattgtaatgatgatcaaatttctttaattttaatggaaatttcaaataatttgaaaacaattgcaactaatttacatggtacaagagctttacaaaaattaattggttgtttaaatacaattaatcatcataatttattatcatttgcaattaaaccaataattgttgatttaattcatgatattaatggtaatcatgttattcaaaaaattatttcacattataataataatgatttaaattttttaattgatttaattattttaaatttatttaaaatttcaactcataaacatggttgttgtattttacaaaaaattttaattaaatgttcaaatttccaaattcaattagtttgtaatgaaattttgaaaatttcaaatttattaatgaatgatcaatttggtaattatgttattcaatatttaatttcattaaacttaattaattttaatattaatttattaaatttagtttcaaatgatttaattaatttaagttgtgggaaattttcttcaaatgttgttgaaaaatgtattaaattaaatccaaataatttatttaatgaaattaatttgcatccaattttgaaaagtttattaaatattcaaaatttaattattttaattaaagatcaatttggtaattatgttgttcaaactgctttagaaatttcaaattggtcaattaaatttattttagctgaaatgattaaacctttattacctgatttaaaatttacaaattatggtaaaagaattcatacaaaagttttaaatattttatcagaatatgataataataactttaataactttaataattataacaataattttactaacaatacccaatcacaatccataccaagttcattattaccaccaattaattttactaattgattatgtcattgattatatcaatacgtactaatatccaatacaataccaattcttgtctttttcatgtgttaaatgtcttattctccacttgtatttcattataattttatcatataccagttacattgttttatatattacactttatcttttattctactattttactatctcctgttctctttactttacttaacttaacttaactttggcttatattttctggtgcacccgtgtctctctataaaacacttatataataataataaattaaataataataataaaaacctcatcttatcttatcttatcggtgccccggttaaagcggttccctcggagatccgatagtggcatcttttaatttttattttctctgaggaaggttaattttttttgagtttgggacggctctcctggtttccttataaagtcgcctttctccttctttttacttcttctttcttgtttgcccttgtttcttctttggtttctctttcttttgcaacaattattgctcaacttagcaattgacatacactacatacatctaaaagtcacattttattattaacactcgttttattaaatattattactaattataattatcacactctatctatctatctaattacataatgcagttcaattacttagcttcattattgatactctctaatttagtatccggtgcaattgtaccacaagctgtaatggacttatttaattttgttgaagaagttgaattagaatcaaatttaaatctagattatattaactcaaaatcttttgaagatttaccattagttaatacaactgaattacaagaattaatcactgaagaggcacttttagcaagagctgaaaaattatatgaaattgctcaattttcaaataaatcttatggtcatccaactagagttattggttcaaaaggtcattggggtacaattggttatattaaacatgaattaaaaaaattaaatggttattataatatttcagttcaaccttttaaagcttttatgtctgaaatttataaaattaatgcaacaattaatgatgaaattcctaaatctttaactgaaatggatatgtcaccttcaactccaaataaagaacctgtttatggtaatttaacattaattgcaaataatggttgtaatgaagaagattatatcggattacatggtaatattgctttcattaaaagaggtttatgtccatttggtgaaaaggctcaattagctgcaagatttggtgcatctgccgttattatttataataatgaacaaggtgatattagaggtactttaggtgtaccacctgaaggtgttcatgttgcaccatgtgttggaattagtaaagatgaaggtgatttaattgcatctaaattatctaatggtgaaattattaatgcaatggttttagttgattcatttgttggaccaattacaaccgttaatgttattgcagaaactaatcatggtgatgatgaaaatgttgttatgttaggagctcatagtgattcagttactgcaggtccaggtattaatgatgatggttcaggtacaatttcattattagaagttgcaactcaattaactaaattcaaagttcaaaataaagttagatttgcattttgggcagctgaagaggaaggtttattaggatcaaattattatgcagagaacttatcagttgaagaaaattctaaaattagattatttatggattatgatatgatggcatcaccaaattatgaatatgaagtttatgatgcaaataatattgataatccaaaaggttcagaggaattgaaaaatttatatattgatttttataactcaaagggtttaaatcatacattaattccatttgatggtagaagtgattatgttggatttattgaaaatggtattccagctggtggtattgcaacaggtgcagaaaagaataatgcagaaaatggggaagttttagatagatgttatcatcaattatgtgatgatttaacaaatattgcatgggatgcatttttagttaatactcaattaattgctcatagtgttgcaacttatggttcagatttaagtgatttcccagttagagaaatttcagataatgttaattcaatgtcatttgcttatagaggtgataaattagtttactaatgaatttaatctttaatctttatttcttttttcctctctttatttcttcgtttcttaatattacattattatacaattttttttaaaaataaaattacaacttatctaaataatcatccatcgtataagatctataatcttttcgtatttgatattcatcatcatttcttaaaggagtgtggtttggtttgttaatcgtatcaattttattattattttcattcataaattttttaaaattcattatttcactatgttttaatttttgtgaacctgaatttgattttaattctaatttagcaggtaatgtttgaactgatgatcttttctcttcagttatttctggttttgttaaccatgatgtatcatcatttttatcatcatttttagataatgaaatagttgattgattaattattggttttgttaaaatattattagttatccaattatttgattttgataaattttgtggtgacataaaaattggtaattgaaatttaaattgttgtgttgtgggtatattatctggactattattcggtgaaagtgaagatgtagtttttgttgttttcgtctttgatgatttattaattattgatgataaattagatattgaaatatcttttgaaattgttttatttattaaaactggaggatttgttggtttatatataggttgttgttgaatatgtaaagttttatatattttattaattgaccatctagattgaggattttttattaataaattattaattattataaaaattgaacattttggatcaatttcaaatgataattcatcaattgatggaattaaaggttctttaattgctatttgatgaagtaattgaaattcattatctgcataaaatggataaattgaataaaataaataatataaagtaacacctaatgaccataaatctaatttaaatggatcattaataagtgaagttgatggatttttattaatattatcaaatattttaatagcttttgaccaatttgatttaattgaaattttctttgattttgaatttgaatttgaattaatttttgatgaattttcatcatttgatgatgataataattcaggaggtaaaaataatggagtaccaataagttttgaaaataattgttcattatctaattgatgattatttgttaatatataacaagtatcaaaatcagttaattttatttgaccattttggaaaactaaaaaatttgaaggtttaatatctctatgaattatatttaaagaatgtaaaaattcaattgatgataagatttgaattaaattttgtattataattgattcaattgatgatgataataatgattgatgattattgttaattgaatatttgaaaattgatggatttaattcaccataaattgataattcttgaattatataaacattaagtgatgatattataatatttaaacatttaacaatattaggatgattataaattgataatttagttataatttcaatttcattatcataattagttggagatgaagatgaaattggtaaaattttatttatctttgcgaatgaattagattttgaaattatctttattgcaattaataaattatcaggttttcgttttgctttaatagcagttgaaaattttccatatcctaatacttgacatggtgaataatcagataaatcactcgatatcatatctttagtgaatcaggagtgttttatgtgtatatattatatattactctctataaattttagttacttttatatatataacttttacccgaatagcattactataataatttggaaattcatgtactcaaacacaacaaataaagtgtcatacaaatatatgacgtaatcatatgattcgcgaaatattaatattaaacaaatttttttttttcatttgactataaaagaagatgctattccacttttcaagtagagtaacttcctgtactttctttcttaatacaacgccaggagatcagttgctacgtacatggttcttgctttttaccagaaccatccggcaattgtctctattaatggtatattaactaatttttggggattaatatttaattaatatcatttcataattaacttaatacaatgtagagtaataaaaataattatgaaataagccatcttaaattaaaattgagaggatacttcattgaaggttttctttgattttgaaaagagggtaagttatacttatattacgtaataaacagtaataaacgcgtaaaacaatagagattattataatactttttaatacgcgtttagataaactggctagaataagagagagaaatatttttatttttatttttatactttttctgaaactggtgagatttcaatattttcatttattttgatctattagtgattttgattttgattttgattttgatttggtgattggaggattaaactttactgattttttcactcttgctcttactctttcactgatcatccaaccacacataatgatcacccatctgttcaagagaaaggaaaaatgtactggtagtgaacaaatgtgtcagactggtactgatacaacaaatactttagcaatttgtttagctgttattatacctgtcgttttagttattttagtcgttggtgtatttatgtataaagcttatcgtagaaataaaaaggaagctttagatgatgatgatccagattttaatgttgataatataattttacctgattatgaaatgtcaaataaaatttataatccaaatattaatactaatatagttaatggtagtactgattcatttggtaatccttttaatgaaaagaatatacctaataataataataattttgcaaatccttcttatccttcaagtgatcctctggttttacctttcggtagtagtaaagaagaattagatagatattcaaaaaatttaggtttagattatcatgaatttaattatcccgttagaaaaatgaattcaaatcaaaattcaagacgtaattcattatctcattcttattcaaattcaagtttaaatttaaatcaaaataataataataataatttaaaatcaaattctccattgaaaaatattaatagtgattataataataatgataatcaatcttttacaaataaaaattttcaacaaaaatcaaatataccacctccattacatgtcgttggtgatgattctaataatgaagaaagttcagatgatgatagtgatgataactctgatgaagattcagatgataattctgaagaagactcagatgaagactcagatgacgattctgaagatgatgaagatgaagatgaagatgatagtagtatagttcacaacgatttagaatcaaaacttgaaaaaacatcaaatccttttgaatctaaattagataaatcattagataactctgtatctccaattacagatgatggtgaattaaattttatgaattcttccaaaaccaccgttaatgaaataccagataatactaaagtacaaaatccacttggtttagcagtcaattcaaatattgcaaatgattttgatgctaaaaattcagaaatcccagatcttggtaatgatattccactttcgcctgaagaggaagaacaactgaatcgaatgaaatctgtttatcaagtttatttctctcgtaatggtagtaaatatattaaaaaggatgcaccagtttatggaaataataataatattgaagataatacagaaaatcacaatgataatataattccaaaatcaagtgataatgaatatcctgatgaatctgttggtttacctccattacctcgtgaacaattagaacaaattcaaaatcaaaaccaaagcaagaatatattacaaatccctggtgctcataataacgatggagaacatgatgatgatgatgaaacagataataattatagacagagtgtttcatcaagtgtttatttacctgttaatgaacatagtgttaataatacaacagctggacaatttgctcatcaacaacttggtaatttacttccaaaccaagatgattcaaataattataataattatggtcaaaattatcaacaatatcctgatccatatcaacaatatcaacaatatcctgatcaatatcaacaacaatatccacctcaacaatatcctcaacaatatcctcaacaatatcaacaacaaaattatccacctcaacaatatcaacaacaatatccaccacaaaattatcctaactacccacctcaacaatcttatggatatgcatcaaatcaaagatcacaacaatattccaattcatcaagaaatttaccaaaactggaaaaacttccattacctcatcaattaaataaacgtacatcaacattagaatcatttacaacatttacagcagattctcataaaaatcctgtaacacatcctgcaatgccaattgatcaaaattttaatccaattaatcatgttaattggaaaactgaacaaacagctgatgcaccaagtccaagtcaaattagaaattcaattgttatgtttaatccagttggtttaagtaaaaattcaacttatgtttcaaaaggtactgccaaggaacgtgttcgtaaattaaataaatttcaaaataatgatgatggatttataccacctggtagcccagtacttaatggtccattatatggattttatgataatgtacctgaaagacctcatggtgcagagaatttaatacctcatagtggttcccaattagatttacgtaaacaaatggataatgctaatgtttaatttcattcatttaaatcaatccactattaaataaaacttttcactcatttacttcaaaaagacattcatttcagtttactctttactttaaaaaaccctctagacttcttaactactttacttatttgatatttactgtataatataagacaaaacaaatcaaatcaatataaataaattacgtaatgtaatattcacgcaacaaatcggaaccacttgacttttacggaagcatctcaatgctagctcagagatctctgtttagatcttgtttttcttccctgtagatatagatatagacaagaacagaatgtctatgaatggtttgaaacaatttattacaaatgtaagacaatcgtctactaaaaatgatgaatttaataaaataaacaatcaattaagaataatctataaacaacttaaagatccaaataattcagattatcttatacttcaaaatatttgtcaattaatgtatatcaagttatcaggatatgaattatcagtattgaatccaaatggtgttggacatgagataagtcaagaagaaattagaaaatttgcaattgaacaatgtttaaaacttatcaaatcacctataatagaggataatgataaggtcaatgatttaaatgatgtattggaaactcgtcgtactgcttctttagcattaaagaaattgtttgcaagatatttgaaaataaatgaacttgaaatgatcataactaatgcaagttcagatattaattcaattgttaaatatgagcaatctgaacattttctgaaacttaaagatactttatggacaataatcggtaatgaattacaggatataggtgaaattttcaattttgttgacggtgaaatattggataaaccattcatgaaagatttcacaacatccttgttccaattattaaatcatgatgatcaagataatgttttcaaaaaatatacaaaaccaagattaattatgtgtattgctcaattatttaaattaaatcataaaggaatagaatatgttttaacaagagataatctggcattagtgggtaaaacatttgcacaaacttcattatcaggtccaaatattataatttcgttatgtaaacttttagatcaatggattaaatttgattgggaaggtattaaaagtttagaaggtttattaattacgaaaatatcagaaattatacaaactgtaaaatctattcaatcagaaaatgataaaaagcaaataaaaaattatgattggattttaaaatacggttatgtcacaattgcattgttgaatacgttaagaaatataacaactgttaaatctgatagtaaaatatctcaacttaataatcatgtcacatttttgattaataattgtattggaattagagcaaaaatttttaatgaagtggagccaaataatagtaagtatcaattgcttaatgcaaatgtgcttttaacgtgtttatcattatacactaataatattgggaaagaggatggtttaaactctgcagatacaggggttgtcattgattcagttgtatcattcattaaatttaacactaatttgaatgtaagatttctgtatatgaaaaaattattagagattcttgagaataataataatttggggaatggtagaactaaaattttaaatgaatttaatatatggaggaaatttatacgtgataaagatacaagtttgaaaaacttaacatgcaaaatacttattcaaactttaaatactgataaaactggcgatgagaatattattttttcacaaatcaaagaagtggtgataattttactgtatcatctacaggcatgtgaatatatgaccagaggtgaaatattatctgaaattttaacaattttggagaattataaagaaagtggtattattcaagaaacggcaaggaaagttttaagagttttaataacaattggaaattatgaagagaattcattcgagagagcttataaacttattgaatatgcaacaagtaaaatgaatggtaaggatagtcataacgatattattataacaattctagaatttatttgtaaagcattaacagttggatgttgtgaaaattttattaaactatcgttacttgtatttttaaaaaacttaaaagactggaaagctggtgatttatctaggcagttaaaattaattattgaaaaatatgaaactgcatcaatatcaacaaaattattgattttagatgtgatgagttcattttataatattatagaagatgaaaatatgaaagatttaattcaattagcatttgaacaagaatctgaacatattaatatagcaattagacaaagagcatttgaatattcaatgttaatcaaacatgatattaaacttgatctttccattactattgatagtataaattctttaccacaattaatatcaccaaaaattaaagataagggaataatattaactgaaggctgggaaaatgagtttttaagatttcttaagtttgaccaaggtattttatataataaggatggtttaaaagttatttataaggttaaaaaagagaaaaatatgggatttgtaagtttgacttataaacttaaagaagggacggaatctagagttaaaagtttaattatagaagattcatataatgattctgatttaaaaattaatggtattgtcaaaaatgataatgaagggacgatgagttttaactttgcattgcaaaagatgtattcatgtgagaaagaacctgttgttagttttgcttttgatgatactattgtcaatttgaaattatcgttatgtttgaaaactttacatacaagtgaaggtaaaggtatgagcttacctgtttttcaaagtaggtggtctcaattgggtaacttaggtaaagaaagtggatcaattggtcaaatgagttataaattaccttcaggtaaaagtgcagaagaatttattaaggtagcaagtagatacttgaaaaatgtcaattttgaagttgttgctacagaaattgaatcaaatgaaggtttcagtatcatgtgtggatcactcctctgtgttcaatctatcactctgggtgtattaatggtagtaactggtgattcaattgaaattagatgtaccaatccatggggtggacccttgatgatttgtgagcgcgttgttccacttttagaaagtatttgatttcagttttataataaattaaatttcattgaatgaccttacctattataatccttttcttttgagttaaatgctctgtataggtaaacggtcttttagtacttcacaactattgtataaacaatatattcctaatatgtctttagcttacacacaagaaagagcaggagaattaattgaaaatgctaattcaattaaaaacaaagttcataatttaagtaatggtaaaactacattagtctgtgtttctaaacttaaaccagcaagtgatattcaagcattatatgatgcaggataccgtcattttggtgaaaattatgttcaagaattaattgaaaaggcaaaagttttaccaaaggatatcaaatggcattttattggtggtttacaaactaataaatgtaaagatttatctaagaatattacaaatttatatgtcgttgaaactattgatactattaaaaaggcaaagaaattaaatgatactcgaaagcaaatgattagtgaagatccatcaaattttgggaaagttggggtttgtgttcaagttaatacatctggtgaggaacaaaagagtggatgtcaacctagtgatgaattagatgaattaattaaagttattttagaggaatgtgattgtttagaattccatggtttaatgacaattggttcatatggtgcatctcatagtgaaggattgaaccctgaattttcattgttagctgaggtaaaggaacatgttatttctaaatttaatttaagtgatattcaaatcagtatgggtatgagtggagattttgtacaagccattaaacaaggaagtaccagtgtccgtgttggttcaagtattttcggatcaagaccaccaaataatggccattaatatccataaatcattacatgatttacaatttttcgtaatttatattttatagacaccaatttatgtttaaaatcaatttaataagctactattataatcacagaacgataattaatcgtatattaatcgttatcatataaagacagatgttttgtaatgccttagcattgaaaagttaaagattgcgttatcagtagaacttggagtttttcatcgcagtggacgcaatgggaggaaacactcgatgcactccactattttattttaaatagctgcttctactgggtgtatagttcttttatatttgagattgaatagttagggacaatgccaccaaagaagaataacaagggtaaaaagagtgggtcaactgtcactcatcgttcctctaaaaataaggaaaccgtgttagattatgaattagatgaagtatatgaaactaataagactaccaatgacaataagaatattcaagatgaagaacctgaggaaactattgaagaaaaggaatcaaaattagcagaacaagcagatcaaggtgttttctcatattatatgggattagttgatatttatattaatactagacatgttttccaattattcatgttattctttgtcacaaatttactttatttagttttcaaagagagagaagataatggtgatgaaaatgcaatggattatattgtaaatacatcatgtatccttttagctattttacttgaaggatttgcagttttaaactctagatttactcaattcaataagaacaaaactacaattaaaccacaattattagattttaattacatttattcagtttatttaccattagcaatttgtttacttaaagcaccaaacaaagttattgttatttcatgttgtgttgcacaacttggttatatgaatatgtttgtgcgtacattaatctcatacgttattttaattcaattttcaactgaaagaattacagctcatttgcttcttctcccaattggccattgtttcttctttgaaatgattaataaatttgttggtaatgaacttccaatttatgaaaaatcttttttttcaattttatatgttgcattatcatactttataacaattcaagatagtaatattactttattcattatgaaaaatttagtcttatcatttacagttggtacaatttttgcatcaccaattttagaattatacaaaggtcaagttgagaaaagtttgaaatatacatggttatttgccatttacttaatcttttcagcggctggtttgattattagtgataaattattattacccgtattaaatcaatttcaccttaattggttaattgaatttattaaatcttcaaaggaaagaacagatattttccaagcttggattattgcaacaattgttttaataccaaccattttcatattattcaataaagttttcccaaccgttaatttaagtattaaacgtaaaatttggcattttgttctatttggtatgctcgttaaaccaatgaaggaacaacctgaattagtttcaattgcattatttggtattttaggtttattagttgttgttgaaatgattagatctaatgaattgccaccatttggtaaatccattaaggaattatttagaaattttgaagatgaaaaggataatgatggtaaatttaccttaagttatatttatttattaatcggtgtttcacttccattttggttaaataatgttgatggattaagagaaagtagttatattggtttaattacattaggtttaggtgattcatttgcttcaattgttggtagtaaagttggttatagtaaatggccaatgtctaataaatccattgaaggtagtattacaatgggtatttgtacctttttaggatatattttacttgattatatcaatggtagtggtaatgataaactagaagtgctaaactggacaaatagatgtatggttgccgttttaagtgcattatttgaagggattgttgatgttaatgataatctttatgttccagtttttgcataccttgtagaagaattattgatgaattttaattagaacttacctttcttctgcaattgtatattatctacacttcctttctttcactttttcttaaatatttttataattttcaaaagcacagtatttattactttttcctaaactcttacatattaagagatgaccgaaccagctgttcaagagtttaagctgattgacttgatccaagtaagcgacaaacatgaatcgatagaggaggcgaaacatttcgtgtcagggtacagagaatatctaacaacttcgaaattacatatggaaggtcaattggatcttttacaatcatcatatggatgtgttgtaagatacactagtacgcgtgattggataggttatttatggtatatggttgaaactattaaaaataagccaatgggtaataaaagtgtttgtttaatagttgattgtggatatcaactgagaaaactgtttaaggatgaccaacatgttatactattaaccatggaagagtttgaaaacatgaatttaaggaaagatatggaagatttggacaaacatgttgaattatgtattgtaagttgtgcaggtgttgtggataaatacgtttcccgaattgttaatgttgtgaataactggaataatgaaaactcctcaattccattgtatgggaatgtaattgttggagttttagacgttttatgagatataatttacaagatcaaatcgttcctgttaaaggtttatggggggatttttcttatcaaggtttgaataatagacgatattcttacgcaatacagtgacaaatcaagcattaaagctactgatggtatcctctcagattatcagagtatacaattgatcataagaagcaagtaataacaataccaatatacaaggaatgtacacgctagatgcccttgagagtcagcatcaacacccccctctaaagaccctgggaactttcttagaagttcctcaaagaaaatctgaaaatttcgttttcttcactgcaaaatttttttttttttttggttttctgatcaatttttctttcatgaatttgtatacttattttagagttttgtagttgtttcctattatcaaaaataccaatagatatgtcaactacagacgaacaaacacaacaaagtattcttcaacaagtggagttttatttttcagaatcaaaccttttaaatgatagattccttttcactactcaaaatgctaatgatggatgggttccaattcaaactatctctcaatttgaaagaatgaagaaatatagaccaattgaagtcattgttgaagctttaagaaaatctccagaattattagaagtttccgaaaatggtgaaatggttagaagaaaaattgctttaccaaaaaattataatgaaattcaattaaatattaataagagatcaatctttgttgaaaaattaccagaaactgcaactttagatgatttattaaaatttttcagatcaattgcaccaactaatcaagttagaatgaagaaaaacagagaaaagaaatttactggttcatgtattgttgaatttaaagatgctaaagatgctgaaaaaatattggctgatataacagaaaacaaattaaaatatggtgaaggtgatgcagctgtagaattagatgttatcagtaaaacttcttatgatgaaagtaaagcacaaaaattcggtgaaagaagaggtaataagggtaataagaataagaagagaggtagaaaggaagattctaaagatgaagaatctaaggaatctgctgaagcaaaagatacaaaggaaagagatgcttcacctgttagaaaagcagaagaagttgatgttaaagaaagagattagttaattagtttcttttttaaaatagatataaaacattttatgggtatattaactatttataagctttcaatctgtataactttgtcacttaatataataactttttaaattagtttagatagatagattaaataaatgtaatagtgtacatgtcattaaagaattcatgatttacctaaattgatatggataaaattttatatttcatcatcattctctctattatggatattgttgagcaagttcaccaccattggctagaaagtctctgttctgcaatttttttagtttctgatttaggtttcggtctagatgaagatctacacatcactgtaatataagttaaaaagtcagaaaaatccataccctgttcaattttcgatatcaaatctggaggaaatagatttttgtttccttcaacaattttttgatgtaatttttccttttcgggatcaatacaaaatatttcaaaaccatgacatatttccataatgtcttcagtcaatttcttgtaattaccattttccaatttaatggcactagcttgcattaacaatttttctggattaactgggatatccaaaaactttatagcttcactaagtaaaaaaacagaatttaattttattttgagacagactctttcaatataatcaatgacatgttcaggcaatgactgtttgatagtgtaacaaatagctggatctgcgtgagcacaaactttgacctcgtgtggaaataaagtacccttggcaactaaaaaagcttgctttataatataatcaatatctacataacccaaagaattcctcaacatagtaagccatgtcgtaaagttggagcttttatttaaaggaatgatggaaatcatattcttgatcgctgttggtgtcaatgtgacgcattctttacgtttatgaaaataacaattattgcacctacgatacatccaatcaccatcatatctaatagctttggaatcatcaagaactgacaattgtattgacttcatacgtctatcaaatggattttcgcccttaatatgcgttttactagtagggttcaaacttgcgttgctcttatcgtagtcatcaacacgtttataaatttctgttcttgttttatcgtctaaatgtggaaaacacgtcaaacttctgagtgtatcgatgtgttttgtcatcacagccaatgtggcatcattatcatcaccttcaacttttatattctccattgacaacaatataatattaaatctctgtggtaatactataaattagtggtaccaatgagcccgggtttcttccatttcatttaaaaaagaattaatatgattacaaacaatgtcgataaaagataaattaagagcagcaacagttattgtttcagttgaaataattcatttaatcgatttttaaatgacaaatgcatttttcataaaagccaaaattttcaaattttacgcgtcgacatgttttcaatattgatgatgatttccacattttggtgttttttgatattttaatgatttatttttatcgtgttggtcatagatatatctatttgttaaatcacctattggaatacagcaccatgacagaatcttcatatgtgaaaacgtttggtccagcagcaaatgaccctttgattacccaaaaatgtgataaattatgctctttatttggactatcctctcaagatctattctcaaactgggaagcatttacttatacagaattaaaggatactaaaactaaaataagtctggagaaccttgaacttttacaaaaatatatacaaagaacaattactgaaaaaaacaagttagatgctatggattctttgaaactaaacaccaagcattcattacaaagtaaaacaagtgcaaataccagcttcaaccacgatgctgatactagcattatcaaaaagagaaaactgaatataccatcatctccgaatagttatgcatctgaatcagcaaatacttcaactgttgtaaaatcaaatcaaatagttgaatctttgaacactaacaatatccaagataaacaaacaacaattcttaataagaatattaaaattttagctgattttataaaagaaaagtataaatataggactatgaatttaaaattattagacattgctgattatttagatgaaagaattgaaatatttacagaaattgttgcaaagcattatgatatagatgaatctaagtttggagacccaacgcgtcaatcacaatcagaaatatacactgttggaagaattgttcctgacagttctttgaattccggctcaacagatttaaatttgcaatccttatttttagaaacttccagagtgagtgggtttgggattagaattcctgtagatctctcaaatgttactaatttttcctttttccctggtcaaatagttgcattcagaggtattaatgcagctggggattgctttaaagtgttagataatttaaaacttcactacttgggtgctagtacacattcttttgaagatattgaggctttctcaaacattcttggtgatgataatttaaaagttttagtaactgcaggaccttatcattcaaaacattctttgaatttctcaaggttggaaaactttattaaacatgctaatgaagaaattaaaccggatgtcattataatgaatggaccgcttatcgatattaattgtattccaaatattttaaacaaatcgtttttgaaaagtgatgatgatttggatgatttaaagaatttggatgatattttcagatcttatttagcaccgattttaaatgaaattcaatgttccaaagttatcctcctaccacatggatcggatattgtcaaccctcatacgccatatccacaagctgcttttaacaggaaaactttagggctaaataaacaattcaaatgttttcctaatccttcattgtttagtttaaatgaggtttcatttggtgcatcaaatgctgatatactaagagatatgaaagacgtgccaacaaataaaacaaacaccaacagaattgaaagaattgttgaacatcttctttatcaaagacacttctatccaattagtcccacaccaaatccaaattttcaagtagatacttcatttcttggtttagcagagttagataccagtatacctgatgttttcattataccatcagttctgaaaccatttgctaaatttatcaaaaatgttttggtgataaaccctggttcttttattcgtcctgacggtaatggtggtacttatgttctgttacaagtgaaaactccagatttcgaagatttagacactgtaatgaatcctacaaatgaagatgatgacgaagaggaggttacacaaaattatttaactaccttgagtaaacgttcgagagttgatgttataaatgtgtaagatataatatataatagagttttctttcaaataattgttagtataaaaataagtaaattcttttaatcaaaaagatgtttgaatttgagttgccttgactaaaagatcttcaatgtttaagtttgactcatcttcttcgcttctttcagtcaaggaggtgaataatgaatttgcttttatttcattttggaagtcttcattttctttatcatcataaactttgtcaacaatggtttcgacagagtggactaaaatctgcatcaaaatacctgaagcaactgatccaaaaattatagtgtaccaagtgttttcgacacaggtttgattgacataacaactgatttcattaacatcgtcagcattgttattatacatcaaagtaatagcaattgaaacaaatgatccaataataagtaagtaacgcataaatgatacccatggttgagaagatgagctacgtgcaccaacagctggtttcgaaagtttgatgaatttgatataatcaccttcttgttgaactaaaccgaaaacaaaacaacttagagcacctaaacaccatacaggtccaaaaagcattaagaatccgtattgtaaaacatgttgtctataatcatcatcaatgctaatctctggtttcaaaaagtctgcacgtacaatctctaaaaattcgtgttcttcaggatcatcaacatttttaaagtcaacagtttttgctgatgctggggtacctaaaatacttgcaattttggaaatgttaagaacttttgataaaacgataggaactacaaattcaacaaatgtaccaataacttgattaataaccataaagtaaaaaatttgacttgacattcttaaattgttaacttgatattgagattctaatgtggaaatctttggaatgtaagaatgaacggatgtagctcttgatactaatgcttggatggtttgaagatatggattcaacatgtaaccaacaggtaaatatataaaagcagtaataagtaatggggagtatgatgctaaacagttgaaaacaaacatttttatcagcaatgatttgttttcatcttctttagttgggtttttttcaaatttaagatattgtttggatatgataccgtaaattattgtgccaactggaactaaaacacatactaagatagttggaattaatgctaaaattgattgcaatggaccttgataaatttctgtgatgaaaatttcaagaaggaagcataaaaattgaagagaaaacaaaccagttgcactcaaaagagtaattgggatatatgcagtttgacgaattaatgttttccatgttggaatcaattcagaatcttccagaaatacggtttgggttttatcgatgttttctaaattccaatctctctcggttttcttctcagttgcatagatacaagagtaacaagttagaccaacaactagattagcggctgcgtagattagggaatagtttccaaagaaataccatgccaaaatacccattaatgaaatacatccaactgatgaaacataggcttggacaaatctgtagtagatggcatattttgtgcctaaattctcttttaaaaatctaacattcttatgacgaacatcgtttctaaacattttacccatatttttccaattagaggaagtttccttttctaaattcaaaatatgtttgactggtaagatacttacaacattattcttaccaacttcaacttcacacccaccttttgattttggtaaagtcaatttcaggtaaattaatcttaatctttcagcaagtgaaattttctcatcgcttgttgcattttccttaacattgaataacgagtcaatttggtttgaaaccgtgactagtttattgaatgatgtttcggttatagtaataaacaaaatcatgtaatttgtgttggtgtcaggacgaacattaacttcaaaaccattgattttcaaaaaagttaacagaatctttaaatttgcttcagattctaaatctgtagctttctttttaggatcatgtttgaaaagaactttaattgcaaaatctggtgaaatttcaagtaaattggagttcttagaagcaaattcaacttcacttttttctgaagagccattgaccctttgtttcaattcctgggacattgcttgttctttctattaagctgaaagctattcgctggctcagaattgggtaagtatgtggtagagaaaggaagaaagaacgtttaaccagagaacaaaaaaaaaacaatggacaggtattttgacggagatttttttgggcctaagtttcagtctcagtaaatcccccatgcaattttacaaaagatttgatataaacggttgaagtgctttttgtttgaaaacatgaaattttgttgttgataaacaattaatataatacaaatatctataaattacacaagtagcaattgggataaaaaatatgtagcaaatttagtataaaataacgaacaatgttttgaacctttacgttggtttcaaaaatttagcaatgttgaatggtaatttatccacttctacatgttttaccttattgtaacgacttcttcgaccatcactttgaagtcttttcacatcggcttttccggctgattctattgattcaactagtagcaatcgagcctgttcttctgtttcaaaattaagctcttttaatttttgttttgttagtctatcgtttgagttttgaaatgatttctttagtttttttgacggtgaatgagttaaagtaccatcaacataatcattttgaggtatgtctggaattgtgttaaagaatgtagcatccattgtttcgtttctattcgtttgggaagatacaagatcctttccatttaaaaattggtcgttctccacggaatcatcatcaactccgtatatcttgcttgggcgtttcctctttcgagaagcaaaatcaggcctaattctaagctcatcgtcgggatcaatttcactagcatcgccctctgtagcatcttttaattctatttctacttcaccaatcatactaccttctaattgttttttggtgatcttaattggctttttatttttatctgaaatttgggatattgtatccatttcattggaaccactttccttgattaaagtttttaggttgttgacttgctcacttgaaaacaaatctactgatggtttagcattatcgttttttttatctgataaatcagccagatgcttagtataccaattcattccgttagatgtggattgtaaagttgacccttcgggaacaactacatcatcagtctcttcttctgaactaattaaccttctaattttctgtattttttcttcatctaatgattgggaagatgattgggaagacaaatttggtcgtttattaatactggattctaatctagaataaaacatgtcactacttccgatttcgatttttactgatgtggaagaagattgtgttgatgattgcgttgatgattgcgtagacttcagatcattttctgcaaaagaattagctgatgactgtaacacaaaataatcatcggtttgtgcatcctgttgatatgagttttgactttgagtatattggttaataggtgagtttaaaaagttttgagaatttaaattattggttgtctgtttttctatgtcctgagaataactggctttaggaggtatatgttctgaagttttatttgttctttcatcttgattattagatccaattaaatctgtattttcagtatctggttcttttatgctttctgttgttgtatctttttgttgagtgttatcaatcgtcatttcttcatcttgaactggggcgaatttttcttcattgtctttgtcagaaaaaatggcattcttactcaaagtgttttcttgttcagttactatatcagtcgtatcttgtgaagcagtttgataagtcggtgcatcaaaaaattcgtcatcgtcgtcatcatcatcatcatcatcatcatcatcatcatcatcatcatcatcatcatcatcatcatcatcatcatcatcatcatcatcatcatcatcattctcctcttgttcatcatccttcttatcatcttgtctttcaatcgctttagttgttttctgtggtatatagtcttcttcaccagtttctacgttcttcaaatcagaaattctctcaaaattttcgggaatggagaaatcttgatcgttgacgttatcctcttcaaactcgttctttatatcaatatcattaatactggaatttttatttaaattatctctatcttcttcttcgtcttcttctttttcttcttcatcgatttcttcgtcactagattcatcggtatcatctctttcataatttcttacttctgattttgtgagttgtttggtatctagattttcttcttctttctttactataaattccccgtcactttcgtcactacttgaatcttcagtagaatcatcgctatactcttttttaacactcttcttatgactgtttgatgattcgttttcctttttaatatgtttaggtttttttagtgtctttttgggcttctctggcggcttatcttttttataaacattcctaacagtgatttttgttttagttctttgtttaggttttgaatttttcttcgcatttaatttcttttctttttgggtatccttactatttgcagctttttcatcattatctgagttttcttcttctgatgttccaagtaacggtatatcttggtaaccatatctatcacgaatatcagtcattgccgtattttcatctactatatctaagcctaattcttcaattattcccagttcatttgccttatctaatgctgcatctgcgattttctttgcattagaatcagatattttatattccatctccttatttaaaataggatctaaagtacaacctttaggataggctgttttcaccaactcaatttcataatctttaaattttgtacctggttgtctccaataacattcatattttctttttgcacaacttccacaaacgggagatacacgatcacagcgtttatggattttcctacatgtcaaacaacctcgtggaacttcaatagatatttccgaagcagcagttggtttgtatttcttcttctgtctagcacttcctggagtccctgacctacttgaaaccatacttcacgtcctattataactcgtatactctctaactgaagacaaactgacaccaaatcaaacagactgggaaattcatgttaccagataattacctaaaggggaaactgtgcgacgcgtctacactatttacatccgtgcactctacattaaattttacaaactattactattttttctactccccgcttgtaaaagtgaaatattgattctactgattgtaatgtgtgtctattttagaagaagtttcatttcaagaggtatataacacgcacaataatgccagctccagtaccattttcagcacaaaatgccaaatatgttgcatcattatatagagaatcattaagaactgcaaagaattggattaatcaaaattcattctatagagaaaaggcagctgaaattagattaagatttgaacaaaataaaaatatatccgatccacttgaattagagagagttttaaataatactaaagaattattagctaaatttaaacatccagatccaattattccaccaaagagaccaggtggtattatgtatgatagaaacgctccaccaagatacgaagaaggcccaaagaatttcaaaaatactgtatgatcataatggttttataacacatacactctatatatcttatttattcgttaatataaatgtttttttcctatgttatatcacatgtatgagttatcacaatatcaaaattatttttttttgtcattattttttggttgtgaaagtgttactcaagtaataagaatattatatttgtatgtaattgaactgaatatacatttagaaaatttggatgttctaaatataagaaattggaatccaaccaattaaatgtattataatagtaacaaatatttctcggatagtttcatcgaactgaaattcattcttcctccttatatttcttcctttgaacccatttgcatgtatgaagtattaaaactttgctctgtagaattagtaaaaaagtatttctttaatagatctcagattatactaaatctggaattgtcatataactacataaactggttcttcctgatagtgtcactacaacttcattaaaaaaaaaatcttctttttcctataaattatatcggtttgaattattacagatatattacaactgatttgaattaaactgctgatcaacattaaaaaattataacaaggagcaaaataacaatattatgattcttaaattataagaagcgcccaccatcaggaaaacgggcaaaaatattctcaatttgaatcaaaatttcacgaaggctcagttcattttttattactgtaatcaatgcttacttcttcctgtagacaaagatgactttcattctagatgagtttataagcagttttatgccctccgttgcagagagtaactatctgacccctaagttttgtgtagccttcaaatctgaactgaattactaactataggatatagcttcggaaacagcaacgcaagaattgctaaatgatgatatgatggatttgttcctttactatattgacgatatttgtgatgaaaaaattacagaattgagtcatcaagttaagttttatggatttattgcatgttttacaacaattgctcttataatgggtggtgtcttagctgttacagtttatatgtttcattcaaatgaggatgaggatactgatataaatgctttggaacatatttttactgccgaagttaaggatgataatgattatgataaaaataaacttaatgataataattatgttgctcaatgggaattgtccaagaaaattagggataaagctttattctggaagaataaaaaaaatgaggatatttatggtaatcttattgatgtgtatgctgaaaaagagcaagaaaatggtaacgataatagctatggtaatgataatgatgagaagttttattcagcaagagctgtttcaagatcaagtattttgaaaactcctgtttctaaatataaagagaaaagtagagatattagtcctctctctttagctagtgacacacaatttcaaaatatttcattaatgatggaagatgacgatgacgatattgatggtagtgattatggattgaatggttttgctagtagatctgaggataacctaaatggggatataagtaatagtaagttgcatacaattaatatgtctatgataggtcctggatattactatgtctatattggtaatatttatggaaattgggaagaatttgaaaatcgtttacaaaatgatgtaaaagttagtctaaagggtgtaaacaaggcattcaaaatacttgatagaaaaattctaactgatttcaagaaaggtaaaaatttaaattctctcaagatgttaagatgtgcattaagtgataataattttcaaaaaatagttctagaaaaagttattaataaagttgattttttcaaagaattggtattgaatgcaggaattgttgatgaaatcagattagaaatatacttaatcttttatcattcattttgttttgaaagtgatgttctgattactttccaatttttaaatgttataataaggacaatggttgaatcattgagtcatgccaatggcaatatcttcaatgatggaatgaagattttagttgagatagttggatattgtgatattgtagatttcaatgaacgtatctttgtagataattttatgggtatcaattttatgaatgatagagagcaaaaaattttatgggaagttctaaaattagttattgttagatggatgtttgaacacgaaagtgaaatcgagaatattaagatttacgatattttaagagttaaagttgaaaaacttattgaaagttatgtggaaaaggataatgaaaaatatttagaatttttattaatttgggatatggttaaacggagtggaaataatgataaggaaaactccgtgagaattaaacgtagaaagagcaagaagctaatttaaaatattaagtagttatatcaaaaaattatatattgtagattatataacgagaaaaagctatttttataaagaaggatacaagaaaagattaattttaatgaagttcaatttcttcagctggagccttaacatttgcttgttcattcatgtgcatcttagcttggtggaataacagttcttcttcttcttcagttaaatcttttttacccttaatataatagaaaggatttaaatgtctgaatgaaaatttaacgaaaggaaggtgatcatgtctttcctcgtaaagcattaaacctaagataacgataagtgataaccagtaaatattgtaagaaataactgaaccataagttccggtgttttgccagcccaataatgcattgaaaatatcccaaccattatcaatttcagggttacaacaattaacgtgccaaacagtttctgtaatatcataagaaccaggacctgaaccagattctgaagcatcaccaccagttttcttattaaattcattagcttgtaaataccagatacctcttgagaaaagacctgcagcaattaaataaagaattgcagttgagatacaaaggaaaatttgtaatgaaactcttgaaccaccataatacatgaaagtaccaactgcaataccagcgataagaccacaaacgacaggtaatgggaaagctcttgctgaggcttcagaaataccaacaccaccgacgaaaacgacagcttctaaaccttctcttaaagttgtaataaaaggtaagatgaaaagagaatatttctttaaaaggtaaccaatcttaaaacgttcagatttctttggaggtggagtcataatagcacgagcaatcttaattctccatttcttttgtaatttattaattctaaccatagcaataccaaggaatgaaataagaacagttgcaataatacagaaaataccttcccataaatcttctgcaccaccccaaatatctttacctaaagtatagtaagcaccaatgaaaccaccaccaataccaagacaaagaataataccagcaattgaaccagcccaaacttggatctttaattttttagctaaagctttattttctgaaccaatagattgtttaacgaaggctaaaagaacagagataacaacgaccgcttcaagggcttctctgaagacgataaagaaaatttgaacattgaagacgtcagccattttgtttctttatttaaatttcctttgcttacctaaaagaaataaataacatagaaataaaataataagattaaaataaagtaaaagtaaagataataaccaaaataaagaataaatttagaatgaaaacagcaatcaaaggaaaatatgagaagattatgagtagattatatatcaattaaaaataaatgggggagcatatgagttaaacttatagcggacaagatgtcaaccagtactgttgtgaggattgttgatgataatacctgtattgagaaattactttctccgttaagttcggtccaatgtgattgacatatagcgaatttaaaatttatttttcccgttttgcttcacacgtttcggagatttcggactcgtaccttttattcctgtcagatccattattatcgttattttattgattaagtatgttgtataatgtcgtataatgtcgtaatgattattgagctagtattatcctcactctattcgtctaatgagtgttcaagatcagaaacacatttacaattggggcaaagaaattgtggatacgttttcaccaataacggtctaatacaacggtaatgccaacaatgaccacatcctgctaagaatgcactctctccaacatgaacatcttcaaggcatataacacatgttgtagcaactgttaatgcatcaagttgtgcccttgcatttttagcaaatcctgatgctcgtcgtatccaactatcattaatttcaactctcattcgtacagctctataaacatcctctgatccacctctataatcaactccaaattgaactaaatctccatcattcagttttattggtatctttgatgcctcatttggtggtgaaagtctaacttgattaacaaatgtaccacttgatgatccaacatctgttacataccaattacccatattatcaacattaagaattgcatgtttacgtgaaacaaccttacttttaaatgttatacaatcatttaaattagaattaattgccttatctgtatgacgtccaactgtaaatgatgttgcaattttaacacgtcgaagcattggtccaaacatatatgcccttgtcattgaatgatcaatagcgggcgttaatctaattgaaaatgatgtattattctcacttgttataatagaatttgtagtagtttcagtaatttcatttggttctgctgttatagtattaccccttgtacgggtatcttcatcagtacttgacatttgatgttataatttaacttaaatatagcctctatactatacttcaaagaggtcagtgataatatctcgatgatgctcattttaaagcgaatatttttgcgaaaaggggaatttccaatgaaaaattataaatttcctaacaaatcacccaatcttttcatatataaataaaatcatcactgaaaaaagaataccttcttctactgaatcaattaattatagttaacagtaatagtaataactatacgataagagtatttataaaatcttatgaactcatttttatacacatgtcattacaaactttcattttcttaatttttcaaaacaaatctataactcactaaggaccccaacaaatccttccatacaaacttttaattctttcattttaccttctacgggttcccaaactaaatattcttcatgtaatccttttaatgtctcagttgcttcaattcttttcaatccaattacttcttcaacaaatcctcttaaactccatggaatatgataatcattacattcatttcggaattcaacttttttcaatgtttcatcatatattgaattagatgtatccatcataaacttaataccattacgataactattcttatcttccatcatagtaaaatgtccaccttctccaacattaccttgaaaatattgacttatctcatttaataattgataatctttatattttaaattcttcactatgacaattaattcaattaaactaataagaaaatcacttagattttccttaccatcaatgaatatattcctataaatgttgcaatgatcaatatctaataataaacttgaatggattccaacaaaacaatcatttaatgatccaactaaactaactttaaaattttccttcaaaagaatttcaaaatcttcaaatgcttcactttcactcattccaaacatttcactgattatttctgcatcttgaccaacattcccacgattgctgattttactttcaattgattctaaagctccataatatgcacctcctaaactaataaatcctagcttatcttgtatttcattagataacaaaccttcatcaactaaaaatctcaaaactttcaaacttattgaacaattcatgccattgctaacacaaacaaaatattcacattttttaatctcttcatcccaatcttttatgatttctatgatcccattcactctatcttctcgtttaccgtatccctccacggataatgtttgaaagtcaatgtccacattgttaatatctccccatcttttcatttcagaaacaactttctttatcatcaattcactgtttaaactactttctcctatgatatttcttacaattttctgtggtaaaaacccatgaatacttagcacaaatgcacgtttataactcttttgagcatttttcatattttgtaaatataaatgtctctgaggagtaaatcctctaacgtattgacttaacctgatccttgcttcacttctcagtgtatttacacgataattattttcaatctccggtaaaactaaactttcattgtgtatcaaggctgtatccgttttcttcaaattacgttcataaatttcaaacattgacacaggaacttccttcactctaacaggtttattacaaccacttactccacttaatataatttcagggtatttcaaatcatcatcactacggaatactgcccaatttttactactgggaattccgtaagataaacatttaatttgattgacaatttctttcctttgtaatttattcaattcatcttccactataccagcacttaatatttctccattactttcaacttctaccactccagttcctctccatgtcattggattccaccacctactttcctctactatttcttcaaaacttacactacgcattacaacaggttgtgctcgtccaataaatgataaggtactcattcgtcgaccaatattccatccatcaccttcattctctttcacttcatcactatcactccatatatgccaaaaagagcctctccggttgttcaatgcttcatgttcattgtcatttgactccatttttatctttaatgataagaaaagctaatacagtaacagggtacttaaaaaaaataacaaatttccctcatcactaaatctgtttttagttatacgctgtgtcactgagtttctttatcaacaaaacaacgacaagttaatgtggttaaaagaaatcgaaaagcgtttggatgaacgtgataaaatacaaagttatgggctttacaatacccgtatgttttgattacgatgcaataaataatttagaggaatctatgaatactaacatttttttaaaaaagttgattacatgagtaatcagacactatactataaaacacgctgtgaggagttacagagtgatgaaactgttcaattgctaaacagtagtttgaataaactagaatcgttggagaaaaaagtcaaatcgttggaatcacaagttttcgaaaaagagaaaattaatcacgatctaatggtagtttatggaactgccatttctgacaaggaaaaaatacgagatgaatacaggaagcttgatataaagtataacaagttagttgaagagatgagagagaagatgaagtcaattgaacttatcaatgataaagtcattgagttacaattcgaaaacaatatcctcaataacgaaaaattaaaaaataatattaagcgttaagtcaaaaaaaaattttataatggaggtgcataataaattttattttaatgttcttttggggtcctttgcttctatataatcaatgacgacatcgctttcattggtacttaaacaactcgatgttggtcaaaaaacaggactcattaatgatgttcttggatacctaactgaaaacgaacaatatgaattacatatgccatatattgacactttttgtgagctttcaactaatcaatctgataaaaatcttgacattcttaggaaatactgtatcagaatcttgaaacttgaagatccatctagtcactacaatttgattttcaaactattaaatattaaggattcaaaacttgctgaagaattaattaattatgtaactgataaattaatcatttatttaaaaacaaatcctagacattttaatgaaaagatatccaaacttattgaaatcccatcatctgtagttgattatgagttatctaacaaatacgttttgaacctacttagatttttagaatggtttttcaccaataatgaaactattgttatcagcaacgacaaacttaacggtttatgttacacatatctaacaaatgaagaacttgaaatctcaaaaacttgttccaaaattcttaaatggagaattgagtcaatttgtgaaaatacagagttattatggaagatcatttttcaacttgaaaaatctaaaaacaatactgaaatttcttatggttatgtcttatggttaagattctttaactactttagaccagaaaacttgctttcaaattcagaatttcaaaaaatacttaacttggaagattactggacatttttaaggaatggtttaataagtctttctcatgaacataaaaagttttctttaacacttattcaaatgtctgttcaatcaatctctactgacatttcattgccaatcatgcaatgggacgtatctgagacagaagaatatattgatagttggaaaagattctgtacattatatgaaattttagggattgatgctgcaatgaatcaagctcaggctgcaactaatgatttactcaatattttctctaaaaattctaaaattccagttccattttctcttactattttatcagttggttttaaagcttcaatggataaaattaaaaagtttgcattaaaattgacatttagtttaccaaaggaaagtttaagtctgtttaaacatgatattaaatttatttccaatgttttcctcccatttactatgaaatcatcacatttttcagttgatactttggataatggtaaaaaatttcattgtgagtttggtaaccaaataagaagattcattgctaactgtatttcatcattagatgataagaatgatgtatctagtttagcatcaagtattttcaatgtcattagtgaaaatagattaacttttggtattgcacgtatttatatcatctggggtgttcttgatggtttaagattacataagggtttagtactaaatgaagaagctttgaaatctctattatcattatttgaaactactgcagagggtgatatttgtgtaactacattacatactattcacttaaacattttattacaagttgatgcgcaattagttggactcaaatctttgattgatgctcttgcttattttattcaaataaatggatggaaattctatgctgaaaatgaagaatcttttattgattatttcacaacttattttcaaaaagatgagtttgttaatctattgaatttacctttctctactgaaggatttattgttgtattatcatatctcgcatctatgaaggtagatttgaaatctgtgatacctttaattatttcatatcaagatagttataaacttttagttgagatgtcacattgtgggttaagttttgatgctatttggaaagacgcctccgttattctgaaaattgaacaactgaccgcacaaatggtaaatggtgatgatttagaaatttctatttattcagattcttccaatttgtttaataatcaaacattattttctcatgaattttgggatagtgttgatgttaatttcatgtttcaagatattcagcaaaaactaatcaatgttgataacatggaagaagccaactactatattgcccaatataaatttttcagtggttgttttgaaaaatgtatttttaatgaaaatgttgaagttactttggatgatcttgtcagtttattcactaacgcattaagtaaaatacctagaggttcagatgttacttattataaagctaaggaccaattaatctcttacatattgtctaatgttaaagcattaattaagatttcacaatttgatactacattcagaaaaaacattttagaactatcgaatgatgtgatttcaatttctgaatataactcgcatctcatgaatgtacaattgattgaaactatgttgagcaatatgactgaaaaggaaccactcgttgagttggaagctatgaagattgttgaaatattagaacttatttgggaagatttagttaaagatcgtttaattttgagccaacgtgatttacatcaacaatatattgaattattgttaaatggcaagttacttctttattctattgacaatgaaagatttgctgattctctttttaaaattgttgatcaagcaattacacagtcagcaggtagaaaaggtattatgccagtattggctagagctatttcaaaatatcaagttgagcaatatgaaaattttgaaaaaactttatggctatctaaagcgattgtcaaaggtgtgttcttattccaaagtgaattgaatattttccaacttgattgtctcattgctgatgagtatgatgagcttcttaatattacaggtgactcattataccaaaaagtttacggtgatgcagaaataagttatcatgtcactttgtatacaattgcagcatcggttagatccagtgtatttgttaatgaaatctggagttatatttttgaaaatgaatcaatattccacttattagaacctaaaaaacgtacagatagagaagaacaatggaaaagattacaatttttttccttgtttgttatcacttcagaagttattgatattaagcacttaacacattattcagaaacatatttactgaaaagattattcaaagaagcgtcaccgttatgtcgaacatatatagagtggattctatgtatcaatattctacgtcaacctgaattcaaagataatgtgttcaaaacattacaaacaaatgcaaagacacaacaaccattagttgttgtcacattggaaaaaatttcaacgttaatttcaatgcaattacctgttgaaaaaaagcctaaattcttaactgaatttattgtggaaactatattgcctacatcatcatcaaatcgtgctcttaacagacacttttcaacaagtttagcatgtagaatttatgaagaaattcttaaagataatcttgatattgatccattgattatgagaacattgagcaaaatttcagaagataccaagttgaatgaatcaccttcagcaagtaactatcgtacaggtaatgctttactgtgggatattaaggaagacatgaatttggttgctatcacaggtggtgttttattaaagacaactgatagagaaattgatgcaatttacgaaaaagaatactactcatatcttactaaatcacaaataaacaagctgagaattccaattggtaaggatgaacgtgatttatgggttaagggtgaaagaaatgctgatgttaaaattgaaagtttttaccttgatttaaataaagaagctgaagaatcttcattattacaaacgaaaagtggagtttggtctactgttatggaattagatgataatgttagagcagcagctcaagttaaaagaagtgatttgattgttgtttcatcattggttgataaaccacctaatttaggtggtatctgtaggttatgtgatgttttaggtgcaggttggatgacagttgatgatatatcagttaaaaatgatcaagaatttaaaactgttgcagttactgcagatagatggatgccattaattgaagttaaaataaatgaaattgcagaatttatgagattaaagaagaaggaaggatatacattaattggtttagaacaaactgataaatctgttgaattgaatagtgatttgaaattcccaaagaaatcgttgattttattaggtaaggaaagagaaggtattccaggtgatttattagctgaattggatatgtgtgtcattatcaaacaagttggtattgttagatctatgaatattcaaactgcaactgcagttattgttcatgcttattcttctcaacactgttaattttaacacgtttttttatataaaatttatttatattatatacttgtacatataaactatcttagaaaccattattgaaatcatctgactcctggctagcgattgtatcaagagcagagataacatcgggtgcaacatttttcactaatttgattgcttcacttattaatgataatttcaatgctttagtattatttgttgataaagttaatgattgaataggggtggtaactttagaatttgaccatgttagacaaataccatgttctaatatttcttcttcctctaatgaaggatctattatagctttttcaccagcagtaccaacaacgaaaattaaaggtggttggaaagtattttttgaatcttgaggtattaaaaacttagataattcccaatcatcactaaaagttggttcttcttcaacatcaaaatcatccttacttgaaattaaaaatggtaattttgtagactttaatgaaatatagacattcattgatattaatgataaaagtgagtaaagtgtataacttgaagcactgaaatcttcaggtaagtataatatagagacatcaataaacaattggaaataatatttaccggttaatttcaataaatcaaattggaagctatccattattgaagctttgatcaatgttgttaattgttgacataatgttgtattatccttttcaccatgtatatcaatatcaacatttattaaatctgcaatacgttcggttcttactacttttgccttcacactggttattatttcaataccatctgcattatatatacgtgatgaaccattagagtttggtaaaaatccacaattagcattcaaaggtctatattgattggcttttcttgcgtcaattcttgaagagtttgaactcgtaagggaatcgtaaatataactactctctgcaactgataacaccattcttttagttgtatgaagtatgcttttattaaaaagtgaagatctatatattaaagaaaaaaattctaagctaacagcttctagaggcaaaatcattaaataaattttcatgctaacgtagaaaaaaaaattattttgttaagagtatatcgactttaaaaaactccgagacggggaattgaaccccggtctcccgcgtgacaagcggaaattctagccactaaactatctcggacttattgtgtttttaaagcagtgggtatttatgtggtcatctttgtgcttacgtaatcatgaatctgtatttggtaaagaatgatgtgtgtcattataatatatcttttaccaatattacaaaatctttgttgtgtttttatacttaaaaaacagaaattcaaagaaaagttaaaaatagggttgaaaatgaaatttttctatgggcacaaaatatgtaccactttgtcttaatcttcaaaaatgtataaataaagcctgtttttagtttattgcattgaatagacgcttagaagtgtcaataaatagatacgatatatatccagggcaattattaattgaaaagacaataattttattaactttaactaattacagcatttttttcattgataagatatataatatgtagctagaaatgaatagaggattgattacaaagtgataacaacaacaaagatagcaagacaaagcataaatacagcggctaaaatgaatcctacacccagcctacttacaggaaattgatcaacagtaagtaatctttgaataacataatatctaaaagtaccaacaattaaagtcagagatgcaacaacaataaaacataatcctaaacttttacttaattttaacaatatgtaactatgattttcatgactaccaagctttaataattgagcaacaccgacaccaactgaagccaagcttaatgaagttctaagccaagctaaaaaagtacgttcacttgctaaatgatcacgagctactgaacctttattttcaagtaatagagatccccaatttgtccaagattttggctttttaatacttaatggtgctaaaagagaattagtctctgtgggtacttgttcaattgattccatattgttattatcatttacagtctttggcatgggtatttcattatttgattcaaatggattgatttctgatgaattactttgatcaatactagttcttgaagtattattcataacagtactcgaataatccatacttaattgtctcattgaagagagattttgagctgaatctgatcttctcttatccataatatgaataaagaattaagaattgtttaaagttttatatattatttatatttgttagtagatcgtgggttactgatagaaagacgccacagttgaggaagaacttcgttgtaaatagattatttcaagtaatttctctgatatatcaacttattgcgtaatcgaccaatttttatgccatcacgattggtgtatatcatcgactcttcggattaacaggttgtattactaatttacagataatatatagattatatcaatttacatttagccattaagttcatgatatcattaatagtgatggaaaggaatataagacagtaatttttaaagatagaagaagaatgcagttttccatatgattatgacgaatataatttttagccatgtctatcaggcttagtgtagtatcaattgtgtgaagaaagagagagggtgatacatttagttgttattgttattattaagattggaattttgtagaagattattctccaaaccaagttctttcttcttattggcaactttacgtagaaataatttccttactctacctgtcatttcactcagttcagacattggttcaccaatatctataaaatgttgaacatttgaatcacttaacaaatgttttgttgattctctcattttatttctataattatcaatttttaaattattattattatcaaattgaaccagattgttatcaactttgggtatattatttttatcattgattctattcttggcttgttttaaaatttttgcattattagcctttgcacctttaactttttgagcttttaaaagtgccatattaccattttgtattacattatttttattattattgttatttttgttatcggatttttgtttaactctattagctccgctaattcttttataatcttcagattctgaaactttctgtatttgatcagcttcaattgtaccatcctcagaaactataccaaatttttgatgttgtagggaagggtctagacttgcataataattagtctgtgagggtaaaatatttactactaaaaacagcagtaatatagttgcaatgagtatgaaaaggagattgagtgtatggcgtcgccctagagagaacatggtattaaaatgagttatatattataagttaaagaagtaaataaagcacaattaagtatcataataaagttaaatataacattaagtactgagataacagaccatcgatttgataaaaaatatcaaatttgacaattgaaatgttctatgtcaaaagaaaaaaaatagtattaaagtgggggctagccagaatactggtttttttcattttcatttggaaaaaaagtataaaaggagggcatgtcgctgtttttccaatgttgtttgaattttaggatctactatactctttttgatttatctcttttggcaagatctctttgccttttggcttagatcaagtgtagtatctgttcttttcagtgtaacagctgaaatcagtctttgttttcgcattgactgttattgttacattatttttgttaagtttgagtcctacaggttgtggttcagatttatctggctcttccatttgggcgttggtgtcgttacccttgcactattactggtttctgacgccttacttcctcttgtttaaacaaaggtttgtttcttcatgtggtggtaagctcattttatagttaatagtaaagtattattttgtaagagcctttgaatcccccttttttcatttttattgaaattaaaaagggcgaaaatattttttttttgaaatatttcttttacgtaagggattcacgtaatttttaatgtttacaatgtgttaaactacaccatcttgcattgattttacattttatttcacttctagttctccactataacaccaacgcaatggccccaagctataatctaaaagatcagcttaaatgggcaactaatactaaagcttatatacccaaaataaatctaaatatacctgatctgacgcctcaacagcaagaacaatataaatcaaggaacgccaattcaaggagttatactacaacggcaatacaatcaaatttcaactctttgcctaattataatataaggaataataccataagtaatactacttcaaaccaaacttcaacaactcaaataccgtcatatacaaatgttcaaagagcaagtacattcaacaacaacaatagatcacaaacttcatcttttactcaaagaacccttcctctgaaatatggtaataacaatgttagtactttcaacaataatcattccaatactactactaataataatgaaaatatatcatttagtagtaatggtagtcatacgcaggtaccaataacaaaattgatgcaaaatagaaataaaaatgtttcgaatgatgatgatatcattgatttaacccaagatgttaatataaatatacaaacaaataatattttgccacagaaaagaaaacaagacaaccattcatctaataatgttaatacaaacaataaacgacctaacaatgatccattctctaagactagtgatgatgatgatactgatgttttttcagatgaagaagatcttgatgctatattagcacaacatgactccaataataataaaagaaatttaaataattctgcatacagtagtaatattaatataccacaaacatcaacacagaaaaatataaatactgctgctatactcaattctaatattgataggaatacaaatagtagtctgaatacaggcctaaaagcaaaaacatatacaccaatttcagatttgaaaaatttatgcaagaaacaaaatgaattgattaaaaatcttttagagctaaattcttttcttcaaaaaggtttgcaaatagaaacatcaacatcattatctgaagactcaaaaagaagagaaagaataacgttttatccagcgttagagaaattaaagaaacaatcaaaagctttacaagattccttaccttctatcgatatagatgctgttaatgagataccccaaatcaataccaatactaaggtaacaaatgaaatatcattaccaacaccaataataacaccacctgctgcttcaacggaactagagaatataaacaatactaagaaacctaatgatatcaccacatcaatagcaaatacaacatctggtacaatattgaccaacaatatagtgaataatatacatagacatgaaaatgatagttttgatgatgatgatgatttagttgaagatgcagatgatactgatataattattcaaaatgctaatgttccaactatacgtaaagttgatgatatacttactacagataatcataataacaatgttcaagttctatcatcaccttcaattcaagtttctgagactgcaccaaacttcctcaataatgatgagtttgatgacgttttcaacgacaattttgatgataataccaccaaagaacgcccaaagagagttttaaaaccaaaagatccaccacctatttggtcaactcaagatgatattgaagattcattcaattgtgaaagtgaaaatgaacctgagacaagaactcaaattcgtaaagagatgggtaattttgttattagtgatgatgaaaatgtatccgttgataaatcttatgttgaagatgatgattataatgatgatggtgaagacgtcgaagaagaatttgttgatggtgaaaaaaacagaccagctgaaccaataaataatcacaattctccgaataattttgataataccgattggaactttgatcaaaatgatattgacgaaatcgaagagattagtcaatctgatatcattaatttgaatcatagtgtcgttgaagacatagaagatgttgaagaaagtttacacccgaatggcgcaatggatctagatgatgatttatctgacattgacacgacagataagtttcaaaatacttatgaaccaagaaaagaacaagatgaaatatttagtgatgcatttgatcatttcccaaataatgatgaactgattaataacaataacaataataaaaccaacgagcaacccgatttagagaatgataattttagtgatgatgagataaatgatgacgacgatgatttgatgatcattgaaaataaagaagattattttacacaacttaatcaagagcgtggaattgatgaagaactcaataatgacgttgatgattctgattgggccgatggtgctgatgatatcattctggataatttacaaacaactataccaaaaattactaagaaaacttctacacaaactgaaagaccagatgatattgaagaattaacaaatcctaataaggaagcattcaaagagttccacggtaagtatgagtggactagtgatatttataaagtattaacaaaaactttcaaattgactaattttagagaaaatcaattaaatgcaattaactcaacattaaatggtgatgatgtgtttgttttgatgccaacaggtggtggtaaatctttatgttatcaacttcccgctgtaatcaattcaggtgttacatcaggtgtcactatcgttatttcaccattaatttcgttgatggaagatcaagtttcacatttaattgaaaaagatataagagcaacaatgctgaattctaaaatgtcagcagaggataaaaaacatcattttaatctgtttttcaatggtttaattgatcttatgtatctatcaccggagatgatcagtaaaagtgctcaatgtaagaaagcaatttctaaattatatagagatgggaaacttgctagaattgttatcgatgaagctcattgtgtttcatcatggggtcatgatttccgtccagattataaagagttgagatttttcaaagaagattatccagatattccaatgatggcattaacagcaactgctaatgaaagagttagagcagatattattgaacatttaggattgagggatcctaaattttacaaacaaagtttcaatagaacaaatttattttatagagtttttgaaaagaagaaatctgttatggaagatattggtcatttgattaataattcatttaataatcaaacaggtattatttactgtcattccaaactttcatgtgaagaaacaagcagaagattaaatcattttggaatcaattgtgaattttatcatgcaggtatgacatttgatgaaagatccagagttcaacaaaattggcaatcaggaaagactaaagttatagctgcaacaattgcatttggtatgggtattgataaagctgatgttagatttgttattcatttaacaattcctagaaatttagaaggttattaccaagaaactggtagagctggtagagatggtaaaccatcaaaatgttttatgttttatagtatgaaagattcaagaactctgcaaaccttgattcgtaaagataaagaattagacaaagcaagtaaggaaaatcatttagataaattgaaacaagttacacaatattgtgagaataaaattgattgtagaagagaagttgttttacaatatttcaatgaaaaattcaataggagtgaatgtaataagaattgtgacaattgtttgaattttgctaatactaaagttgaacagaaagatatgaccgaacttgctaagaaatgtgttttattggtcaaagaaattcaaagtaatagggtaacactggcaatctgtcaagatattatcaaaggttttaaacatgccaagatacagagtaagaattatgacaaacttgaataccacggtgttgggaaaactttcaacaaggttgaagttgaaagattgtttttcacgttaattaaagatgattatttaagggaaaagccaattagtacaggtagaggattttcatctaattatttatatttaggagataaagcaaataaactgttgagtggtaaagataaaatttcattagaattttgtattatgaaagataatggtgctaacactaatggttttgaagatcaacctatacctatagcaggcaaacaaccatcatttagaccaagttcagaattatggaatggaaatttagaagaatttggatacaataataatggtaataatagaaatgttaatagtaaaggtataaatgtgaataaactttcaattaatgatcctttgaagaagagacatttggatgaatgttatttagaattgagaaagataaggagtcaattagcaactaaattttcactaagcaaggagacatcattaggatcagatagtatgttgaaaagtatgtcatttcaattacctattaataagattgtctatgaaagtttagatgattacaaaccagatcaaggtaaatattttgtaaatttccaaataatgattcaaaaactccgcacgaaaagaatgaagttgtttgggacattagatttgacaaatagtaattcaaatacatcaactttagagtcaacatcaccatttttcagttccggaacaggtaccggtgcagctaagaaaagagcaggtaaggtagataaggtttcatcacagagtagacggagtaaagcaaggggtaaatccaatccacgtaatagaatgcggagcggcaccaagggatcaagtacttcatcatctcaagccagtgccattcatactacagccatgaaactgtgatatattgtgatgtataattgtgtaatagtagtttaataatgaaattaagatagaaatatagaaatagaaatagaaatcaagatagtgagggaacagagtcaaaaaaagcaaatttattgatattgatattgatattataatagaaaaaaatattttcgtagctcaatttatttcggactgtcacattatttattcttttgaaatttgtcattttctttcttttgttagtggatagttcagcaaactgcttcttgcatcaatcaatcaatgactaaattatacaatatccttgttatcggtaacggtggtcgtgaacacgctttagtttggaaactttctcaatctcctttagcaggtaaaatttatgttgctccaggtaatggaggtactgcaattatggaaaatgttgaaactgttaatattggatcatcaccatcagatttcccaaaacttgttgaatttgcagttgaaaagaaaattgatttagttgttccaggtccagaacaaccattagttgatggtattgcagatgcttttagtaaagttggtattccagttttcggtccatcacaatcagctgctcgtatggaaggttcaaaggcattttcaaaagattttatgaaagattacaatattccaactgcaagttatgaaaattttactgattatgaaaaggcaaaagaatatgttcaaaatgcaactacaagattagttattaaagcatcaggtattgcagctggtaaaggtgttttaattccagaaaataccgaagaagcattagaagcaattaaagaaatcatggttgatagagcttttggtaatgcaggtgacgaagttgttattgaagaatatttagaaggtgatgaattatcaattttatgtgttagtgatggttattcatatgtttatttcccacctgctcaagatcataaaagaattggtgataatgatactggcttaaatactggtggtatgggtgcttatgctccagctccattagcaactaattcattattaaagaaaattgaaaaaactattttaaaaccttcagttgatggtatgagaaaggcaggttatccaatggttggttgtttatttgttggtattatggtttctccaaatggtgaaccaaaagttttagaatataatgttagatttggtgatcctgaaactcaaactgttttaccattattgaaaagtgatttattagaattatttattggtacagttgaacatagattagattctgttaattttgaaattgattcattaaaatcttcaacaactgttgtcatggcagcaggtggttatccagaatcttatgctaaaggtgatgaaattacaattaattcatctaatttaccaaataatacttatatttttcacgcaggtactaaattagattcaaatggtaaagttgttacatctggtggtagagttattgcatcaacttcaatttctaataaattagaagatgcagtcaaaaatgcttatttaggtgttgattgtgtttcatttaatggtaaatataatagaaaagatattgcatatagagcatttaaggaattatcagataaaaaaataagtattacttatgaagatgcaggtgttagtgttgatgcaggtaataaattagttgaaaatattaaaaaaatggttaaatcaactgcaagaccaggtgcagattctgaaattggtggatttggtggtttatttgatttaaagaaagcaggatttgatgatattgatgaaacaatattagttgcagcaactgatggtgttggtactaagttaagaattgcacaaatcatgaatattcataatactgttggtatagatttagttgcaatgaatgttaatgatttaattgttcaaggtgcagaacctttaatgtttttagattattttgcaattggtcatttagatattaatattgcagaaaaattcgttgaaggtgttgcaaatggttgtaaattagctggatgtgcattagttggtggtgaaacaagtgaaatgccaggtatgtatgcaccaggtcattatgatactaatggtacagcagttggtgctgttttaaagagtgaaatgttaccattacttaatgaaatgtcagaaggtgatattttattaggtcttgcatcagatggtgttcattcaaatggtttttcattagttagaaaaattattgatgcaacaaattttgaatatactgataatgcaccatggaatccaagtaaaacaattggtgaagaagttttaattccaactagaatttacgttaaacaattattaccatcaattaaatctaaattaattttaggtttatcacatattacaggtggtggtttagttgaaaatattccaagaactttaccatcacatttaactgcatcaattgatatgaataattgggaagttccagagattttcaaatggttaggtaaaactggtggtgttccaatcaaagatattttaaagacacttaatcttggtattggtatggttgtaattgttaaagaatctaatgcagcaattgtaacgaaacaacttcaagaagctggtgaaactgttcatacaattggtaaacttgttaaacgttcaggtgatgaacctcaatgtattgtacataacactgaaggtctttattaaatttctacaaaggatattatctagctataatatccatcttcttacatctctataattaactatatacactaaatacaaaataataaactgaaaaatttaagaaacaaataataacaatcgacataataacaagccacttcccacatgtcaaattgtcatgaaaattttttttgtgttccgcatgggtaaattgacagaaaaataattgttccgttttattaaagttaggccatcgattacaacaactgatatcattagtatattgctgtaatacattcttttaatgattacatattgtatttaaacaattaatactgcaactatatgaactaagaagaaccatttcattcaataagcaataaagatgtccaatatagatccaagtagcccagtttcaccaggaacagccgcacataaggctaacccagtaacagatgatgaaaattctgttcattcatcaataagtggagattctcaacttgatgatcatagagatcaacatgaatcaataagtaaaccatctaatacaaatgaagttaaaaaatggagaaaacgtacaaattcccatggttcaattaatggtataaaaccaatgattatgagtgaaaaaccttcaacaattgttaacattaattctaatattgcaagtagagatttaattagtcgtatggtaggtaatggtggagatgaagattatgatgaatatgctgttaaatttaatgatttatacaggaataataataataatgaatatgaacagcaaggtattaattttgctggtgttaataatactcctgcaccattaactgattatacaccaggtactaaacgtagatctaaatcatttagtaaacaagttaaatcattaattagaccaagagaggaatcagttggaggtattttgaaaagtggtaacgatgataataattcaattcatagttttaatagtttacattcaaagaaaagtggtatactttatcctgatacattatcaagagttgcatctaagatgtcaacagtttctggtagaagtaatagatcaagacggagattaagtaatgatgacagtgatttagattctcatgcatcaagagaatcacaagaaacagaggaagatgtttgtttcccaatggtacctgaacatatacgtattagaggtattgattttgatgaaattgaagaatttattgttgaacaacgtgaagaggatgaaagaattgcaagacgtgaaagagaattaagaatggataataatcatgcaattactacaagttctgcaagagttatgagtagtgcagcattaaaatatacaccaaggggagaatatgagaaagttacttcatcatcagagagtgagattgaaaaaagaggtggtgataataatagtttcaataattttagtaataataataatacaaataataccaatactaatttcaatgataacaattttaatagtaataataacaatttcaacaatactaataataatagatatgatgttacatttaatcctgagggaaatattcaagaagaagaggagagaagtgaatggaagagtgagttaccaacaagatttagctttttttcaagtgaaatggaagaaactattcattcagcagatattccatcattagtttctgaaggggaagcctttaaaagtttattcgaaccagaagattctatctggtggctagattgttcatgtccaacagataatgaaatgaagatgttggctaaagcatttagtattcatccattaacagctgaagatattagaatgcaagaaacacgtgagaaggttgaattatttaaaagttattattttgtttcatttcatacatttgaaactgatagtgaaagtgaagattttcttgaaccaattaatgtttatatagttgtatttgaatcaggtattttaacatttcatttttcaccaattgttaatcctgcaaatgttagaagaagagttagacaattaagagattatgttgatgttacagcagattggttatgttatgcaatgattgatgatattacagatggatttgcaccattaattcaatcattagaatatgaagcagattcaattgaagattcagtatttttatcagatgagaatgattttggtagtatgttattaaaaattggtgaaagtagacgtaaagttatgacattaatgagattactacaaggtaaggcagatgttattaaaatgtttgctaaaagatgtaatgaagaagcaaaggagagagaaattcaaaataaaaataatcagcagatacaaaatcaacaacaatatcaaaattttaataataataataataaaggtgaaggaaatcatttcaatactactaataatagtaattcaggtatggatattataagcgaagaaaataatgaaggtgaagaatatgatagtagatcaaatagtcgacatatgaataatatgggtaataattatggtaataataatagtaataagaaacgacaagctaaaccaagtgctgatattgcattatatttaggagatattcaagatcatattattacgatgtttcaatcattattatcatatgagaaaatatttagtagatcacattctaattatttggcacaattacaagttgaatcattttattctaatttacaagttacagatatgttatcaaaagttacagttttaggtacaatattagttccaatgaatttaattacaggattatttggtatgaatgttaaaataccgggacaagatggtagtaattatggatggtttggaggtataattggagttatatttttaattgttattagtagtttattaattgttacattatatttaaaacatgttgaaaataatactggtagaccattaggatcagctgcaagtacatggaaggaaaaatttggacgaaagagagataatttaaggaataataataataacagaaatcaaagaggggatgcgatgagtttaccaactagatttacaaggtatggggattggtaaggatagtaactaggaaataagatttaataaattgatgataaactgataagaacctgcatgaatacttacgtaagtaattaagaaagaaaatacacgaaacgcgcttaatttattgagactaacctaaaagggtaataaactagcactataaataaaaatttttaagctattaagctataaatttaagctttgaaaatatatacagccactctagagcactaacacgctaattaattatggttgctattttcttaattgttctctattgttctctattgtttatttattgttatttattgtttactatattggtaaggtgatgctattttagtaatttctattgtttatatttccgctattttggtatttttaacaattgttgcaatttttgctatcgtgttgttgttgtgattcatttttctacaaccctgccacccatttctatttaaactctcctgtttctcctttcttttcaattcactgtcattatctcttctactcctccccctcttcttcttaattttttctactttctttttcactttctttcattaaataagaaaaaaaaattaacaatgctttcatcaatcgttaaatcactcgctcttgcatctgttgcttctgctgctacttattcaaatacttcctttgttccatcaggttcaggtttcttctatgatggtgaagtttatttcgatattatcttaccaaattctggtttctcatctttctcaattgctgctggttcaggtaatggtttctcttttgcaccagattctttatcaggtgtttattctccatctggtactcctttcgaagttacctcagattcaactactgaatcaattgatatctcagctgatgttgatttctcaactgatgataaatatgctgaagttgcaatctcaggtccaatttcttctgaatctgatgctttaattggtatctttgttatctcattagaaggtttaccacaaattattgaaaagagagctgatcaagatttcactattaccgttactgcaacttcatcagttccatcttgggcaacttcaggttcatcaactgctactggttctggttctgttacaactactaatactgcaactgaaacttcaacttcaactgaaactattacttcttgttcagatgataaatgtgaaactttaaccccagttaacccaactgcaactcacactgctactgaaactaccgttgttactattacttcttgttctgataacaaatgtcatgaatcaactgttactactggtgtcaccgttgttactgaaaatgaaaccgtttacactacttactgtccattaactgatgttgatgctgataaaaccgtttctaaaactaagactgttacaactaccacttgtgaaactactgaaggtactactgttactaagagtgtcacttatactacaactgaatgttcttactatgatgttgttaaaccaactactgttattccaacaactattgcaccaactgttactccagttaaaccaactactgttgttccaacaactactgcaccaactgcaactccagttcttccaactaccgttgttccatcaacttcagtttctgttaacccacctgttgaatctgaatatcaaggtgcagctgctactaatgttgcaggttcattattcggtttagcaactgtattcttagcaatgctcttataaatttgataattttcatcatttttattttaaattaatttcaaattaattaattacaacttttcaattctttaagtcattcgttaataatatcgatttcgatatttcattttaaaaatacaaaaaaattataatctttacatggttttaatttctattaccctctttgtacattttgtttcttttatataatcttatacctgtttgtgtatcattacttctaatattaatttcaataatttgacttatactataaaaaaactacctaattaattataaacactaattttattactctcaaccccacatcttaaacaattccatggttttgattctctcattaaacatagataacaataagtatgtccacaattatctaatttatatgcatttgtaattaaactattctccaaaacttcatcctctttaaaacatatagcacaatatctttcaggtaaatgtttatagttattgtttaatgaattatcattattatttccatcatttttcgtaatgtattttcttaaatttgaaatatttggtaatgaaatattacttaaaacttcagtaattgtattccaaattaactgtcgatcttgaaattcataactgattgattgaggatttgatgcaaatgatacagttaattcatttgccttttcatacttaatgttaaataatctattaaagattgaaatataatcaccaaatattaagaaaattattgtattaaataatgaagttaatttatttaatttatccaatataggtgaaattttttcattatattgttttattagggaatataatttgggattattaaatcttaattgatccatttcatcatcatcataaactaattgatttaattttttatccaagtatgaagatatgattttagataataataaaagtttggcaattttagttaatttgtttaatgaattatttgaaactaattttaaattttgtaattgtaatccataagttgttgatctatcaattatgaataatttatataaaatcaattttaaacttaatttgatttcttcattaaattttgttgtaaatctttggaaatttctaggtaatgaattatcattgaaaatttcatttaatttattcaataatatatcatcaacttgatcatccaatagtcctgaatctacctgtaatactctattacgtggatgtaacatggttgtctagtataacagataataataaatgcatgtgtgcatgcataatactaaaacatcaattagcgcttcaatttcaagttaaccagcgcttatcgtgatatcaccatttccaattttaatgcctcagtaatatatcaaaggttatcgactatattttataaagtatataatcatcccacagagttgatgggaagtataaattaaggtgttattcctacagtattatacactgattaatatatcttcatataagtaagtaaaatgattgttattgttggaggtggaattatcggtatttcaactgcatacagaattgcagaattacaaccaaatgctgaaattaccattatttcaaaagatttaccggaatcaggattattaaatcctttttatacatcatcaaaggcaggagcacatttccgtccattcccatcaaagaatgaatatgaattaagagatagtaaattaactcatgaaacatataaacaatttaagaaattatctaaattacatcctgagagttcaattaaatttatgaaatgtattgattatattgaatatgataataaattatatgaatcattatctgaaggatatactgaaattgtggaagatttccaaataattcctaaatatgaattaccaaataatgttaaatttggtgcatcatataattcattttgtgttaatccacatgtttatatggaatttatgttacaatcattgaaaatgcgtcaaagaattaatataattcaacgtgaaatttattcattacgtgaagttagtatgatatatccaaattctacaatattcaattgtacaggtaatggattattatatgatggatcatatgatttaaaatgttattcaattagaggtcaaacattattaattagaccaccattaaaaaattatgaattatgtaattcaagatcaattacttatcaattaagtaatggagaatggagttttgtaattccacgtccattagatggtggtattatattaggtggtacaaagaatgaaaacttgacaaatgataaaccaattgaaaatgaaactaaatcacttattaataatgctattagtagatttcctgaattatttaatgataagggagaattagatattttacgtattaatgttggatttcgaccagctagaaagacaggtgttagaatcgagagagaagttattgataggagtactacaatcattcatgtatatggatttggaggtagtggtattgaaatgagttggggagcagctgttaaagcagtggaattgttagaaatgagtaagagtaaattttgagatattgcgcgggaaatgctgagttgcggattttgtttgtttattgtacacttgtttcttcttgaaagtatttatattatatagacacccagtacaatgacagagacattggatacggagattgatcctcaaataaatacaatggatattgaattaaatgaaattaatatcgcaatggatgatgatcaaattgatcaatccactattaatactgcaattaatactgcaatgaatgtaattaatccatcttcaaatcataataataattctattaataatactattaataataatattaatgatgataatttaccttcatctcctaatagtcataatcaaagtagtcagattcaaatacataatcaaattcaaagtcaatcatctcaaatctccccacaaaataatataactatcacttctaatcctccaaagactaaaagaaagggtaaatattctaaaactggttgttttgaatgtaaaaagaggaaaataaaggtatgttataataataataataataataataataacaaacattataaaacaaagatactaacaaaatttcaaaacttttttttttactaatagtgcgatgaaattaaaccaatttgttggaattgtcagagattagagaaagaatgtatttatttacaaccaaaacgtaaaccttatgaatttaaacgacgtaaggaaagagttaagaaattagctaaatcaaaaagtaatgttaaaaatgaatcaaatatttcaaaggatgatataaatgataatactgataatactgataatactactactaatactacaaagaacactactaagaacactaaaaaatcaacaaataaatctaatacaatttcaaataaaaacaacaacaataatagtataaatgtaattattccagaatcaccaataattggaccaacaattcatgatatttcattacttttcagctcagaaaattatgaaaatactaatgataaattaatttcatcatttaatgatttattaaatgaaaagattaatgaatatcataaattcgaattcccaacaatttatgaatttaataacagtgaaagcaactcttttcataccactaaacacactacaattacagaacatataaaaattgaagattttaaattaagtaaagaacatgaaaaatatttagaatatttttataatgattttatttctttaattttcccctttgcaacatcatctgctaaaaattcatcaaatcctattaaagatatcatattatttcatgcattaaatgaaaaatttgttttattagcaattttatcatgtggtgcattaattaattatcaattaacaaatgatattgaaagtgagagaagaatttacaattatttatcaacttgtttgaaaattttcaaagaaagggaaaataaagatgatgataataataatttaattccaattatattaattacattattattaattaataaagattttaataaatataaattacaatttgaatgtgttggtaaaattttgattttatcaagtattaaactacaagataatcaaaatgaaatttttttagagactatggcttttttcagatcatggtttttcaaaattttgattaataatttaaatattgataatttaatgacaattgaagaaattaaaataattgaatcatggaattatgaagattttaaaattttgaaaaaattacaaattatttggttaccaaatgataaacaagatgatataaatattgggtataatataatttatggatttacaaataatttaagtaaattattaattaaattattatatttaattaaaaagagagaaattgatggttataatgaaattaaattatttgaaataatttcaattttaaataaattagagaatgaagatataaaaaatttttcaattttaattaattcatgttatttaaatgatgaatttcaatttgatattaataatggtatacctgaggaaatgattgaaaaaattcattttaataataatgaaaaagaatttatttcatggttagatataagttatcaatgtaatagattaattataatttttgaaattttaaaagaatttttattattaaaagatgataattatttaattaatcaaataataagtgaaattttcaataatttaagatttctcaaatcaattgaaaatgaaggtggtaaaattaaatcaaaatcattaattttatttaaaaatggtatttataatattggtaaatttattaaagataatgaaagacaaaagttaattaaaagttattttaataatttaattaattttggagattttaattcaattggaattttaaaggaacttgaagataaatggaatgatgatgatataaagaatgatgaattatttagtatataggacagtataaaaggaaggaattaaatttaattattcttattataaggtgataattcattgaaaacttgatgaaatgacattttttttctctttgacattaaaatttcaatattattagaatttgataaatgatgtaatggagataaaccaaattgagaatttgatagtgtatgataattaatatttttaaattccataaaatttattaattgtttattataacaagtatttaattctttataagaagagaaaaccacatctaaattattgaatttcaataattcaattatattattcaattgataaattatattatttgatttaattgggaatgaatatagtttattattaactagtaaatataatgaaattttataattcaagttttttaacattgtataattaaatggtaaaattaatgaatttgtaattatacaaatatccaaataaattgccattgaaggtagtgaaagttttttaggttttgattgattgaaaaattgttctaatgatgacattagtgtaaaacataaattaaataggtattttactttaacatcattaattgaatttaaatcacaaacatagataatataatttaaataactaataccttttgaaatatttaatttttggaaagttgataaataacttgaaattgaataatttataatatttttcggttgattattaacaattaataaaattaaatcaattaattgtttatgatcattttccgggaataaagataataatttatttaattgtttatgatttataagataattttcatcaattattaaatttggtattatttgtagtatttcattattgtcagtatttgatataaagcaaattttattagcatttttcaattttagcatatcatcatcagatacacgaattttaactactgcatttgtcattaccaagagaaaagtgtgagactgaaaagaagaaaaaaaaactacattattatatattccttatatatcatactgcattaccgattggatacttaagaagaaagatcaaaagaaggtgtatatagttaattgaataaaatacaagaaaagatgagccgtcataaacattgagaatttttcaaaaattttatttgcccttattggcgaggggttatgattcataatttggtttttattttgatgtgattcatcatttgatgggtttttttttattattgttgaaagaagtatacaaacaatgagtgatggacctatagtgaagagaataaagagagaaagctctagggattttttgagggatgaaagtattataagtaagttcccaagggagatactggaattaattattgatatgttagatataaaagatataataaatttatcaatgattaataaaatacatcgtgataaattaattgataaaataacaaattcaatttatattaaatggacacaatttgatttattttataaagaatttaataaatttaataatatacgaaagattaaaattaagagagatttaaatgattataatggtacaaatagaggagaatggaatgtttcatttggtaaattatttaaaaaatgttgttcagttgaagaaatggagattgaattattaaatagtagtagatgtttaaaatataaggatgattttaatgaatttaatagtttaaatataaggaaattaaaattaattagttttagtgaaaataaggaaggatatattaatgagaatgcattatttgaattaccacaattgaaaagatttcataatattgaagaattagaattaattggatttacattaagtaaagatgaatatttttatccagatattaaagaagattttgaaaattatgaagaaaggaaatttgatggtaaattaattaaattaaagaaattaaaattaattaattgtgtttgggaatatccatttagtttaagtgatatttttataccagaatatggaattagaaataaatggaatgaagttgaagatgagagtaaaagtttaattaatgaaattaaaattgaatttaatggtaaatttatttcatttatgaatagtgaaagatttaaaaatttagttgatacaaataaaatgaataggatacaatttttaagagagaaaagaatttgggataatgttattaaattagagattaaagttggatatgatggtgaaattaaaccaccaagtagagatattgttcatttagataggataattgaaattggtaaattagttgaaattaaattatggtgaatgattacctaatcaaacaatactcgggaacgagacggtaacaaatgaaaaaacagttaaatcccaatagagtaatacactcaccggacaactgggaagtaaagaggggtcacgaagtttgaattatattgttattcgttataaatacttgaatgggggcaccgtttgttttattttctcttatttggcttccccacaattagtttagtatctctatttagtaattaataacctattgtattaccataatcataatcatatcatgtccgcaattttaaagcaaagagttagatatgctccttatcttaaaaaacttagatcagctgatgattgtatacctcttttcaaagatggtcaatatttaggttggtcaggttttacaggtgttggtgctccaaaagttataccaactgctttagcaaatcatgttgaaaaaaataatttacaaggtaaattaggttttaaccttttcgttggtgcttcagcaggtccagaagaatcaagatgggcagaattaaatatgattaaaagaagagctcctcatcaagttggtaaaccaatttctaaaaatattaatgataataaaactaaatttttcgataaacatttatcaatgttcccacaagatttaacttatggttattatacaaaggaaaaatcaaatgatttattagattttacaattattgaagcaactgcaattactgaaaatggttcaattataccaggtcctgcagttggtgcatcacctgaaatgatttcagtttctgataaaattataattgaagttaatactgcaactccttcatttgaaggtttacatgatattgatatgccaattaatccacctcatagacctccttatccttatatgacagttgatcaaaaaaatggtttaacttcaatccccgttgatccttcaaaagttattgcaattgttgaaagtacaactcctgatcaagttccaaatccaactccacctgatgaaatgtcaaaaaaaattgctggtcatttaattgaatttttcgaacatgaagttaaacatggtagattaccagaaaatttacatcctcttcaatcaggtattggtaatgttgcaaatgcaattattgaaggtttagaaaaatcatcatttaaaaatttaacagtttggactgaagttatgcaagattctttcttaccttattttgaatcaggtaaaattgattatgcaacttcaacttcaattagattatctcaagatggttttaaaaaatttttcgataattgggatttattctctaaaaaaatttgtcttagaagtcaagttgtctcaaattcaccagaaattattagaagattaggtgttattgcaatgaatactccagttgaatttgatatttatggtcatgcaaattcaactaatgttaatggttcaagaatgttaaatggtttaggtggttctgcagatttcttacgtaatgctaaattatcaattatgcatacaccagctgctagaaagactaaaactgatccaacaggtatttcatgtgttgttccattttcttcacatattgatcaaactgaacatgatttagatgttttcgttacagattttggtttagcagatttaagaggtttatcaccaaaggaaagagttccattaattattaataattgtgctcatcctgattatagagatcaattaaatgaatattatcaaagagctttattccattgtacaaagacaaaatcattacatgaaccacattcattaaaggatgcatttaaaatgcatattaatttacaagaaaatggtacaatgaaattagataactgggatgttaaattttaatcttgattaaaattttttcaaatcaaatctattattctattattcatcattattctattatattatattgcttagcttctatagatctaaactaacttatttatttatttatttatttattcctaaacttattgtcatgaacttaatgttattataaaccaatagaaacgaaacatcgataataccattgattacgcaatcaatggaaaatttcagtgacttccccccagtggttgtgatccacccacccgttttcaaagttgtcgagttttcattcaattaatttaatattgatgatattctcttttgcttttctttaatttatttcttctacaattaagtcaattccaaactaacaatggaccaagtcaaagatcttgtaactaaattagaatctcgtgttactgaacttgaatcaaaggcaggtatttcaactccattaccacctgctttacgtatggttttaatcggtccaccaggtgcaggtaaaggtactcaagcaccaaatttaaaggaaaaatattgtgcttgtcatttagcaactggtgatatgttacgttcacaagtttctaaaggtactgatttaggtaaagaagcaaaaaaaattatggatcaaggtggtttagttagtgatgaaattatggttggtatgattaaatctgaattatcaaataatcctgaatgtaaaaatggttttatcttagatggtttcccaagaactataccacaagctgaaaaattagattcaatgttaattaaaatggaaaaacctttacaaaaggcaattgaattaaagattgatgatgaattattagttaatagaattactggtagattagttcatccttcatctggtagatcttatcataaattatttaatcctccaaaagttgaaatgaaagatgatattactggtgaaccattaattcaaagatctgatgataatgttgatgctttaaagaaaagattagttacttatcatcaacaaactgaaccaattgttgattattataaaaaatcaggtatttgggcaggtgttgatgcaagtcaatctccaaaaactgtttggtctgatatcttaaaatgtttaggtaattagaatattaaatttttataattatatttaaactatttaaactacattatttatttatttatttatttatttgtcttaactgcatatttatctaaccaaccactcattttttcaatattatcaccacattctttattacttttacaaacccatccttcttcgtattcacctccaataaaatattcaacatatcttctatgttgattcattttatttgaaacacaaaatttaaactttttttcattaataactttaggaataatattatttttaacaaatttaacaatttcaaccatatttgaaccttttaataaacattttttactactttgacaatattcattctcacatttttcatctccacacccatttttaatttgcagaatataccttctctcaattctttgtaataattttttaccatcaggatctaatatattagaatataaactaccaaagcaaatatcacataattgtaatgaattttcaacattattagaaattatttcaacacataattcatttttacattttaatggtgttgattgttgtaatttcataatttcatgtaattttaaatgagtctctaaatctcttaatttaataattttattacatttaaaacattcagttgttttactaccacattgccattcatgttcactaattccataaaatattgattcattacttggtttacccctaggtaaaattaaatgacaatatcgacattcatgtaaacttttataacattcattattcttatgttcacaaataacatatttattgattgcattatattcttcacattcatcacaaatataatcactcattaataaatcatggaaatattcttgatgtaatttataactttgttcatcgtcaccatatgttgaacaacaatgccaatgagtttttgggatttcctttaaaaatactctattacaacctaatgaacataaaacattatttctcttacaaaaattttcatgaagtatctgtgattgtttcttaataatgttattacaataattacatctcattgaatcttcgggaatagtttcctccataatatcttcagcaattacaatttgaaaatcaattggaccaattatagcataaatataaaccgcaacatcatcatcagtttcatttatccattctttaataggtttattcatgctacccatcaagaatctttcgccatcaacaaattgatcgtatgaaattgtaaaatcgatattatttatggaaacaaatttcataccaactccaatattcaacttacatctctcatgaatatcaatagttccatttttatcattgaataaatccctatattcaccaatttgcaagtttttatcttctttaacttctgaattttgtggaatttgaatatttaaatcaatatctctatcaataacacaaactgtacgtatttgattaaatgtcttgacattattaactttaagcttatattccatttcaccaacttcaaaagttataacatctcccgtcgttacagctgtatagttgttagataacgtggattcaagaaatactttccaatctcgtatactataatttaaaatcggttcaagttcaatacttgccttaccaatatctatcacattatatgccaactccacagaaagttgaattgaatcttcgttatttaaccttaatctttccttaacatcttttgataaaaatatactttcattatcaatactatgaaactctcttactccaacatatgtgtaattacttggagtacttaatctgaaaactaatggatgtggtaatgatgtaacattattttccttttgaagtttaataaaattatttaaaatttcttcaggtaaaatgatcttatccgtatgattaggtagtgtgatgttctcgttcaatggatcatatttaaccttttcaagaatttgtattgacatattaaacaattataaaataaataagtggattacaaatcggaaagaaaagaagtaagtcttaaaaattatatgtattacggatagatctctaattaaattttttatggatcattattccattcttctctaaggaatgtttcaacacctttgtttatttcgtcaatcatttcagatgtacagatatcaactagaatctgttctctctgattatcattgatttctataaattcagataactcacatctttcaagtatcaatgatgaaagaaatggattaattactccacaggcttctaaaaattccatctctgaattccattcaatttcacaattttgaaattcaccatatttacaaactaattcaattattgtcattgcaatcaattttgcattattttcaataactataatttggattccatattctttacattcttcaatgaattgtacaatatttaaatctttaatatcatcgactttttcatcaattataattacaagtattaaactttgaacttgatatgcaatttctgatatttgtttaaataataatatttcctttgtattgatatctctttgataaatattaattggtcttacaaatatggctccacaactataattcatatacatatcatattcaagtttaattgatgttgaatgatcattatttgtttgaaactcgaatagttgaacattttgttgattatcaagtattctattaaactgtaaaaatgcttgtccgaatttttctgcaaatcttacatttaatgcaataactacgaatgcatcatcagggatattgaataaattatcattttgtggaatcgttatctcattttcactagtctctaaaatattgttatgcttattagattcatttttagaaattggaatgttttccttttcaggtataatcatctccggttttggcgttccatttacttgcatagttgtcgtttggttgagaatgttcaaatatggataattattttggaaatctaatgcaacattatcattgttcttcttttttctttttgacattataatagaatctaaaccacttaatggtcttgatgatttacttgatgtacccgtgttgggtatgcttctagttttaataacaggcgtggcaattgttgatctttctttggtttgagggatttttgaagattgatcgaaaactgaattaattgtgccatttttaagtaacgagttttttgtttccttacatggtgatgattttggtattttaggttcataaacaggttcatattctgaaacgggagaaatggattcaattttctctggaagcttcacttcaatatcaattgatgaatcacaattggatgtgttttcaaataaaggtaccaattcatattctaaagatttatctggatggatattattagaattggaaatttctgaatatttaatgtatttttcagaactattactaatcattgttgaaattttagtattatttgaactaattgattcgtcaagagtttgttgaagttttatatttttaaaaggtttccaatccatcatatgtgttttataagatgaaaaattccatttatcaaactgaagtcgttttgatttattatgttgataattaattggtcttatatttactttgaatcttacctgaaattcagttatgctttcatctattagtagttcaatatcattgggattgacttttctaattggcattttcactttccacttacgtttgaatgacggttttaatagttctctggatttatgttcaatggtaattagcttctccgtttccttgaaatcgaaaatgaagaaattcttaggaatttgtatcaattgttctctctcaaataaacaatcatctaaatttaccatttcaatttgctcatcaataacatttttcatagtttgttgttgtttagatatccattgttctttatcagagtatcttttactttgtactatctccggagagtacactatatctaacaaacgttgatccttattttctggaagtattggttcaatatcatcaagaataaaatcttccttttttaaacttttttccattaatgatttaacatctttagacattgatattggttcacgtagtgcattagcctttgccttttgttgctttgccttagtaacactaaattttgaaaagcataaccaagtttctaattttttcccattatttaatattctttcattgtatttgtccaattcaactgtaactgaattgtaatagatctgattttcatgaatgtcctctgtgatatgaaatggatttggtatcttaactgttaacctctttgtatttattttaatcaatttaatcaacttttgctgagcctctggagataatttcaatttctctgatttttcaatcttttctaaaacagataaagataataaacgtgtatcacgttgaggagaattaacgttccatttagtatacatatttgtgtagttatataattgatacaggtataaaaaggatatgaagaaagtaatcagtaaatgtgagctcaattatttttcttcttctctatataagataatttcactttgcttaaaatatcttctagcatcttcatcaataagaaccaaacttaagaatgtacgtgtactaaattttttattaacatctctataagttggaactaaatcaaatccacctaagaataatctaattggtatagtttcacccttaacaggtgcaccatccataatttcaaatctaacaacagttttactttcacttgattgatttgtaccactaccaacagtttctctacgaattaaacttaattccatatgctttatcttaagccttactaataaaaagtaaattcttccaactattacaccttttaaaggatatttattctttgaatattcaaattctatatgtaaacaattttcaatacctacatccattttaacagttgaaattgcagatgaaggtggtgattgacttttattattatcattattattacctttattatctttatcatttgattgatttttatctactggtatttgagtagttttagaatctgattcagctaataaattatttaaattagaatattgataaacccaaatctctctctcttttattatatctgaacttttcattgaaactgttacctttaaataatatcttaatctaacattcatacctctataactttcatacattttttcaacatttctaaattcgaatggataattaatacttttctgtaaagtactaggtgcagctaattcttgtgcaaaacttaggaaatcatcattatttatattaccttcatgatgagtctcaattgtgcctaataattgaacacgtaccccattatgctcaacttttttattatcccttgttctaacaattaatgtacctttaacagtttcaccatctttataaactggtaaacgttctttacgaccttttgttgaattaacttcaattatttcacgagaatcttcaccatcaaaattgatttctatatctagaggagatttgaaaaagaatgacattgtatatgatgtaatgtattgtgtgtattctatgataataccaagagaagttaatgatggtgtattcctctgaagctgtgataatccatttctaaggatgtttaattaagttaatcgcggtgtctatttaatagtatttctatcactttgtttattagtttattactgtaacttgttatataagatataagatataagatatacatgtggataatatactatacaatcatttgaataatttagcaactgaaactgcaccttcttcatttttattcataacctttgcaactgctaattcaaaatcttcttgagttacatgtattcttctctccctaagagcatacataccagcttcagtacagacacctttaatttctgcacctgaacaaccattcattttttcagcaattttctttaaatcaattcctcttgttaaattcattgatcttgaatgaatttttaaaatatcagttcttgcatcaacagttggaggtgggaattcaattttacgatcaattctaccaggtcttaaaagtgcaggatctaaaatatctaatctatttgtagccattataattttaatatcttttgaagattcaaaaccatctaattgatttaataattctaacattgttctttgaacttcagaatctcctccaccacctgaagattcagaacgtgatgaaccaattgaatcaatttcatccataaatataattgatggtgcatgttcacgtgccattacaaataattctcgtaccattctactaccttcaccaatatatttttgaactaattcagaacctgaaactcttataaatttacaatcagtatgatgagcaacagctcttgctaataaagttttaccagtacctggaggtccatataatataacaccctttggttgagctatacctaaagattcaaataattctggatgtttaacaggtaattcaataacttctttaatttctttaatttgtttatctaaaccaccaaccatatcataagttgaatcaggtactttctctaccatcattaatgaaactaatggatctactttatttggtaatattttatgtaaatcataagaatctgattttaaacaaactcttaaagatggtgttatatcctttatatcaatatctttagataaattaacaatatatttaccttcaggatgaattttaaccaatactttctttttacccataactttaataacttcaccaacatatgaaccaggttcttgtaataatttcaattcttcctttaatgatctaacctttgcattaagagtatttctttgagcttcaagtcttcttaaattttgagttttagttgcaagttcaatttcataatcttggatcttttgagaaaagaaaggtttaatcccattgtgatgtacaagttcagcagatgccattgtgtgtattaaatcaactaaatcacttcaaaaaagaagtgatgtcttttcttcaacaagtgtatatcaaccatttgccacccactgcatgtagtaataaaataaataaagacagagacagacaaaaaagacgcgactctcctccttcctaaaagggtaatggcaattttttcaattttttttcacttttttcacctcacttcgttcattttggtggtgcattgcaaattattaaattattttactattatagtagaaccactttttgatcttatatttatcttttctactttaagtaacgtcctgtacacttctgagaccacatcttccacatattagtctcaaaggatataacaatgacttccgaacagtccgtctcaaagccagatatctctgctcctgcaactacaactaatactagtgcaacaactgcaagtactactacaacaacaagtactactactgcaccatcaactaatacaccttcatcattaccaaatcctccgaaaagttcaaatcaacaaccttttgttcctcataatcaacaacaatataacccaaatcataataatcataaaggtcaatatatttcaaataataactatggtggacgtatgaataataattataataataataataataccaataataaaaattatcatagaaataataataataacaataataataattatcgtaatcaccaaattccaaattcaaattcaattccttatggttatcaacaaggtgctccaatgatggttaattcaccttattattcaatgccttatccaattcctcaacaaaatttaccaatctctgataaacctttagtatctcaacctcataaacatgttccaatagttattaaaactaaagatggtaaagaagttcaattaccaaatcatagaaaaaatacttcaatttcttcaatcccaaatatcccttcagttactgctaaatcaaatgattccactataaacaatgataattctactaatactattaatagcgataaaacattacctgttaaacctgctacttcatcatcatccactactactactaccaccacatctacaccatcatcttctgcacccgttgtaactgctccacctgcaaaaacttcaagtagtaaactttctttccaagaacaattccaagctcaattaagaaagaagaaggaagctgctgctgctgcaaaggctgcagctgaagccgctcaaaataataatactgctactcctgctgctactgctccaactagtgaagaaaagactgaatcaaaaccagaacctgttgcagcacctgttgcagaagtaccaaaggaaactgtcgaagaaccaaaggtcgaagaaaaggtcgaagcaaaggtcgaaactccagttgaagctactccagttactgaaactaaaccagttgaatctactccagctactgaaactaaaccagttgaaacatctgaaccagctaaggaaactacagaagaagttgaaactaccgaaaaggaagaatctaaaacttctgaaactactgagactactgaaaatgcagaagaaactaaagcagacgaaacaactgaagaaccagaagaagaagaagaggaagataatcgtatttcaatttctgaatttatggatagaattgcaaatgcaaaaagtatcactaaaccacaagaatttgaatatccagaaaaattcactggtccttcaacttcagcagatgctaaaattattaaatatgatccaatgttcttatatcaatttcaaaatataagtcttaaattagatgataaatggaaagctgaacatgtctcaaaaatatatatccctgataaagaatctcgtgaaaaatctttcaaaaatagagatagtcgagcaagatcaaatggtccaatgagaggttcagctttaagaaatggatctgaatttgatggtagaaattcaagaatgggatctaaaaagaaaggacgtgatagtggacgtcaaggtagtagaagaggtggtgataaagataattcaagaagatcacgtaatggtagacctggtgaaaaatctgaaaaagcagatgataaaccaaagatttcattagaggatgcaaaaccacttgaaaaagctgcaaatagatgggttccaaaaattcaagcaaaagttgaaaaaccagttaaatatgctcctgatggtgttacagttattatagaaggtgaagaattagagaagaaggttagatcattattaaataaattatcattagaaaaattcgatacaattggtggtgaacttattaaattagcaaatcaatcattatgggaagatgatttagcatcattgaaaactgttgttaaggcaacatttgcaaaggcaactgatgaacctcattggtcttcaatgtatgcacaattttgtcaaaaattacttgttgaaactgatccaaatattgaaacaacaactgatgatggtaaaaaaattaaaggttcaggtttaacttataatttacttgttacaagatgtcaagcagaatattctaaaggttggtcagttgatttacctgttaatgaagatggttcaccaattgaacctgaattaatgtctgatgaatattatgcattagcagctcaaaagagaagaggtttaggtttagttagattcattggtgaattatatagattaaaaattattagacaatcaattattattagatgtatcaaaatgcttacaactgatcaatctgaaaatcctgttccatttaatgaatatttacctcaagaagatactttagaaactttatatacatttttattaacagttggttctggtattgatggagaaaatcctgcaatttgtgataatgtttttgcattaattaaaatctatattgaaaatccaaagattggatcacgtattaaatataaattttatgatttaattgatttaagaaagagtaaatggtcaagttcaaatgaattactgcaaggtccaaagaaactttcacaagttcatcaagatttcaatcaacaagcacaacaggaaaagcaaaaattaaatgcacaagaacgtgaacgtagtaataaaagtcgttcaattagaggttcatcaaataattcaagatggggtagtgaacaaatttcttcaaatgatatttcaagagttggtattgttagaaaaactggtactgataattcaattaatgctttacgtaagggtaaaattgtacaagatgattttacaacagtttcatcatcaagatcaagaagttcaagaggtttcggagctgtttcaagatcaaattcttctgctaatgttcaaaatactgaagaagaacaacctgaaacaagacaacaaagtaataattttaatttattgatgaatcaatctgatgaagaaaaggatgattcacaacctgaacaagaagaagatgaagaagaagaaggtgaagatggagaagatgaagaagaatcaaaggaagaagcagcagaagcagaagaagcaaaggaagaagctgttgaagctgatgctgaacaaccagttgaaaaatctaatgacgaaccaattaatgaatcttaattatggttttactattaaacaacaaattaaacacaatatcaatgtatcaaacaaaatataaacaatcatattaaatgctttttcatgaaaaaattatagcaatagtatgaataatgatatcctgtacttaaaatcttcatagaccatgcttaactacttaaagtttttttttttactatttttaatttaatctaatgtatcttttacataaaggttaaaaaacaaatacttttcacattctatttactacacttttatattcttcgaaactatgtttttatttttatttcattgttttttttctttatttcgtaattatatatttctttaaaactttaaaactaatttataaaaaaagattataatgtttgtaagttatgatacttgtctaaactatttagggcttgctattttcaacgattaattgaacaaattcatcttcaggatctcttgcaaatttacttgtatcaccaataaataatatttttttaatgggtatattaattttaccttgtgggaaaatacttaacagattagtatgtatacgtttaacaatatcttcatcacctcttctaatttcatcttcattatccttttcaataccacggaaaaatccacctttatcaacaactgcacataattcatcaattgatgtaacattattaacacaaacttcatcattaaaacaattaagcatatctaaagatttcattaatgaataatttgatgaagtaccaataactattaatcttctaccatcaggagcgtttgaagttaatctagtcattaaagcacgtaaaacaactgatgaaaatcttggaccaattggaacataatcaattaatgcttcaatatcatcaacaactaataaatttaatggagatttataagcatcacggaaagcattatcaatatgttgaactttagcagtttctgacataccaaccatatcctttgcacttaataatctaataaatgggaattttgaatctaatgctaattgacaagctaaagcagttttacctgaacctgaaggaccatataataataatgatgaaaaattaaaattttcagaatgtcttaattgttcaatatcacgttcaactcttttaataacttgatgaatttttggtgaataatttattataccacctttaacacaatcatgtaaatcttcttcatgaacaccaaatgcaggtttaacttcatctaaagcatttaagaaacattgcatatcaactataatattactgaaatcaccatttaattgacctaaagtaccaactttaatatgtttatttaaagcaaatgaaccagcagatttaattaaaccttcaatttctgcacctgaaaaatttttagttaattcagctaattttggtaaattaacatctttaccaagaacgttattttcaaccattttatttgttttaatttttaaaatttgtaatctaccttcttcatcaggtaaatgaatttcaacttgaacttcaaatctaccaggtctcagtaatgcactatcaattaaatcttttctattagtcataccaataactaagatattatttaattgatcaacaccatccattttagctaataattgattaacaacattatcagcaacacctgtaccatcacctcttgaacctctttgtttgaaaacagaatctaattcatcaaagataataatatgtaatgatgatgcatcacctttctttttatattcagcttctgcatctttaaataaattacgaatattttcttcagatgaaccaacatatttagataaaatttcaggaccattaacaatttttggttcctttgcatttaacattttaccaatttgtctcgcaattaaagttttaccagtacctggaggaccatataataacatacctttaacatgtgtcatacccattttttcaataactccaggtgggaaaattcttgaagcaaaagctcttctgaaaatggctgtaaattctttatctaaaccaccaatacctaaatcttcaaatttaaaatcaggtctaataattgcatcagaatttggtcttgtacttgaaggttttaaattaactaaaccatctgaacctttaaagaaattaacaattgaagtttgaacaacaatacctttattcattatattagttgatgcaggtacatcattgacagcaacttgacctaaatctacaacaattgttgatttaacaataatttcaaaataattacccttaaattcaaataataaaatttgggttggttgtaaaatttgagattcaaatttatgaataaaagctttcattaattcatcagaatcatattgaatattatttgttctatttttactccaaaaattaatttctacattaattgtacctaaataaccacctttattattattttcagcaaataaatcataagatgaaacagaaactgattgatctgttgaccaagacccccaaaatctttgattaccacttaaaccaattgaacctggcattattttaggagtatttttaacggtgaaaacaaatttaccatcaattataacatatgaaccatcggggaaatcttgttgagaaacagcaacacaattagtctttgcaatctcattatcaggagaattcttcaccactaaggtgtgagagacagcacgatgatttctacggaatggtaatgacatattgccctgtaattgtggataattgtcaagaaagaaagttcacacaataacactaaaggtaaatccttaacaagtcaattgcgtgttcttattgataaattatttgaaatttcatattcttacgtaataatgccagaattaattttattttactatgatggattattattatgggagattatatactatacagtgtatatattacagtagtacatagtagggattataaattataacaatagtacctggttaaatccaatagacataatatacctacttcactaactgctatactatacaattacaacacaaacacagcataaaagagtggaaaaccccctcggaaatacataaccgacagcataagcttaattaaatttctgaaagccgacttttcattctaaaaagtcggttataagataagaaagttttcattgggagatttacttaaatacaagtagtatttcctttgattttactatgttttttttaatatcattcctttcttttggtaatgacagtcgtatcggaatctactccattggtacccgttaccactaaatctatttcacatactcgtttcttgatcattttatcatgtttatttgcaaatgttttccttggttcaattgactccacaatggttgccacacttttaggtaaaatggcttcagatttagattctcaggaacatatttcttgggttgcttcatcttatttattatcatgtgcagcttttcaaccattatttggtaaaatttcagatgttttcggtaggaaaccaattatattaatttgtacaatttgtttcttctttggttgtttattatgtggtattggtaattcattatcttatttaattattggtagattaattacaggtattggaggtggaggatttttcgcattatcaacaattacaatttcagatttagttgaaacaagggagagaggtctttatcaaggttatacaaatattttctttcatgcaggtgctgcaagtggtggtgtacttgcaggttttattgattcatggtttggttggaattgggctttcttaattcaattacctgtttgtttaatttctggtattgcaatttatcttttctttgaattaccaacaaataataatgaaattactgatgataaaactcattttgaaaaatttaaatcattagattggaatggtgcttttcttttagttacatcattattatcattaatgattataagtggtacaaatagtagtgaattaccaattaattcaccattatggattggattattcttttatacaattattggatttataacattctatttttgtgaattaaaggttaaagaaccaattatacctgttaaaatgatgcataataaaacaatttttgcaagttcattaaattgttggtttgcatcaatgggtatgtttgcaagtttattttatttaccattttattggacaagtgttaaaaatatttcaccattagattgtggttatagattaattccaagttcattagttgcatcatttacatcagttttttcaggttggatgattaagaaaactagtaaatatagaacaatgcatattatttcaggttggtgtattttaggtggtagtataataatgtattttgcaacaaaggaaaataatggatttattgattcaattatttcattaccattcagatatggattatcagttgatacaacaactattttagttgcaatgattagttcagtttcacaaaatgaacaatcattagttacatcaattcaatatggttttagatcaacaggttcaacaatgggagtttcattagctaatgcaattttacaattttgtcttaaatcaaaacttaatgatagatttaatgaattaaagaatattttaccaaatggatggactattgaaatgttgaaaaatgctaaatcaaaggcattagaaaatcctgcatatgcatttaaggatgatataccaatagtaattaaagatgcagttgtaaattcctatgattatgcatgtcatggagttttcgtattcttaatagttacaggattaggtgcattagtgtgtatatattacacagaagagaatgatcttgatgataaatagtagatataatataaaatcagtatatagaaaccctgaaaagagatgaaaaattgaatttttttttccagtgcgtagtataaaaagagaaggtattcccataattttttagtgttttatttactgcacttcttcttttgaacaagggaagtgtaccgtatattagtggatatactgcatttctcattgtagaattatactaaacacatttaatatgatgattaaaattttaatgcatagttcaactgattctttatgaagataaaaactttccatcaaaatgtctttcacccctatctgattttaatgtgttttagtataatatttgtattaatttaattacagttacttacttaattataaacgattataccttatttaatggttttaatgcatacattctaattggtaataattcctttggtacacctttctgtatatcagttgcaattaatttccaatcaccttggataaataattttctaaaatttttatcagatcttgtctttgaactatcatcaggatcaaataaatcattatcatcatttgtattattttccttaataattaaaatcccatcattttgtaaacctctcttacattcatctaaccattctaaaaatgcattatcaggtaaatgaccacaacaccattgacaccaaataattgagtatttatttggttcagaagatctccaatcttgcattggtatatcataaatttcaccaattttaccatcattagttaaatcctttaattcaattctcatttgtttaacaaatgaatcaacaggttctaataaatcaactttatcacaaattttatgtaaataatcacgagtaactctaccaattccagcaccaaaatcaataccataattaattttaccattttcaactgaccatctagattttaatttacgcataaatgttgaactaccaacaatatctgcctttggtacactagttgattcaccaaatccccctaaaactccatcaactgttgcaggtatttcactccaataagaaattgcatcattataatctattaattcatcaacattctcctctattccattagatgtctcttcattattctctgttacaaccttccctggcatagtattctattctattctattctattctactctactctactctactcttctttaaagaccaccactctttactaactaatgaaaaaaatttcaccaaatttccgaaccaccctctaaattcccagttccccagtgtgaaaattccgaaatttcctcaccaaatttcaaatttcaaattctcgttttttttcattatgtcgtccatttccatttccatttccactcttatcgaaagtgtcgtattggtattctatagctatttacacttttcaactgatttactttatctgttcttgttacttttcctttttcttatttcctcttctcttcttttctgatcttctactaagtcagtccatttgtcatcaaatcatgagtaaattcagagcactcgatatattcaaaccattcgttggaatcgttccagaaattgaacttccttatgaaaaagttgtatttgatgaaaaaatagtttatacaattggtatctctgcactttatttattatcatcattaccaataagtggtgtaaatccaaataaaattgctgatccatttaattggttacgtcttccatttgcctccgaagcaggtactttgttggaatttggtgttttacctgttttaacttctgccttcttttggcaaatattatcaggtttaaaaattgttaaaattaattttaataatttatctgatagatcaactttccaatctttacaaaaaatttcagctgttttaattgctttaatttatgcaactattttagcaatttcaggttattttagaccaattgatttcttctcttatcaaaattctttaaattcaacaacttcaattctttggtcaaatatcttaattattgctcaattaacaacttcaactgcaattgttactttattagttgaattattagaaaaaggttatggttttggtcctggtgtaatggttttcattacagtatcagctgcaactaaatttactggttcattatttggttttattactaatattaaatcatttgaatcaaatggtgttattgttcaattatttaaaaatttattcaataaacctttaacaactggtatttattcattattcaatcgtactgatgaagttaattttactcaagtttatttaacaattattgtcgtacttatcttaacttatattcaaaatttccgtatggatatctcaattaaatcaactaaagttcgttcaatggtttcaacttatccaattcgtttattctattgtggtgctttaccaattttattctcttacactattatttacaatttaaatattattacatttgctttaactaaaatctttggtggttcaaatttaatcgcaaattgggaaattgattcattaactaataatacttattatttaacttcaggtttattatatttcatctcaggttcatcttattactctaatttcttatcttatattggtaaaattattgcatttactgcatttactactttcacttcagctatctttggtcgttattggtatgcaatgtcaggttcaactggtaaagatcttgcaaaacaatttaaagaacaagatatcgttgttgtcggtcatagagatgcaactgttgcaaaggaattaaataaattaatttcttcttcttcattaattggtgcaactattttaggtgctgttatcggtttagctgaatcaactggtttatcaaaaggtttagcagttggtgttacaactggtttattatgtgccttaagtttacttgaaaatgttatgagtgaatatcaacaatcaggttcagttaattcacaatttgctcaagtttttggtactaattaatctattaatatgattctttcaaaaaaaataaacaaattaatttcataatatttatttatgctttgattcgtttaaagttcttgttgaatttcatttccaactaaaagagagacctattctacctccattaaactatattatatatatatatatatatatatatataactgttttaaattttataatacattaaaaactattaatacatgtacaattaaacttgattcttaatgattagaaattttaatccttgaaataatgaaaaactctaacaaaagttcaaaatgtatatctttaccatcataaatccattcaacttgcttcaataaatttttagcagctgatgcatttttaatagaatcatgtctcgcaacaacaataattggtctatcatatgcccatctattattttcagtgttaatcactaattcaacggcatataataatttatcaatcttaccaaatctgaatactgatcctttataatttttaaaactaaacagatttctcattaatttatgtggtaatgaattaaatgtaacataaacatcattaaaattatatgtataatcactttcaaattccttcattggtaaacaatcgttaacttcaagaaatttatataatgataaactagaattataatcaagtcttaaagaaactccagatgttgttaatgtcattctctcaattgttctttgatatttatttagtccttgaaaaagtaaatgtagttcagttgaacttgataaaaatcttttatatttaggtgtttgaattagtctaaaattaatctttgaattaggatttttaggtaatttatgttcaatattgaatgagtttttctcccaatcgaaaacattaattgaattaaccaatttacaccattcaaatctactattataaatttcatcaaacagtgaaatataaaattgatttctaacttccgtcgaattagtagtttgaagtataaatgtaaatttaataccatgtgataataaaacttttaaatcttcacgaaatgcattcttatttaacattggtctatcaattataatcatgttacttgaagttgaacttaatgatgcgtttttagccatcattaacattgttaaactccaactataattcaatttctctaaagaatcattaatagattctgtttcattatcattatttcgtgattcttcagaatttttttcaccaccacctaacccttcataacaattcatgttttcataatcttccttttcagctaagggttttaaggtgtctgatggattcatatctgtaagttctaaatcaggtaagaattgggaataccaattatagaaagcaccttttctatcaaatctatctatatttttatatgttaaaaatgtatagagttgtggatttggcgaataagttgcagttaatgtatgatcaaatctgaaaatatttaggtgtgataaagatttcgaataattttcagttttgaaataattccatatattgataactggttgatcatggtaatgtatttctttaggaatatatgatccaaagaatttgttgactaaggattcgggaagttgaatatcaaccccgttagagaattttgtattaaaattaggagtttctctgtctctataaagttgtagactgttttgctctggatgatggtatgttattgaatcagggtcgtcttctgtgtgcattgacttcttactacgcttgtatggttcgtcttccaaacgctcttcatcgtcattacttttatctaatcttctttttagatttttgatctgattgggttcatttttatcctcgttatcttctttttcttcattctcttcttcttcattctctttttgttcactttcttcttcttcattctctttttgttcactttcttcttcttcattctcttcctctcctttttcgtcttcttcttcttcttctttttcttcttcttcttcgtcattttcttcagcttgtatattttttacttctctattaacatcaactggttctttcttcactgttccattaaattcttgtaattcttgtttaatcacacttttatcatcactatttgcatcactgacatcatcgttattcgaatattgatctgtagaaccattatcaaagttttcctgtttaatggaatctgtattaccattcactttctcggttgtatcctgttctaccaattgtctttgttctttggcaagatcaacctttaaagcttcaatggcacttttagttgcaatttcagtttgtgttgtgctttcaatactttgctggtcagtttcctttatcttatgtgtattcgttaagtcttctaggttttctttgttgcttatagtcctgtctgtatccgttatattattctgtatactattcagtatatttgattcagttgttaaaccattttctgagttttcattttctttggcaattcgtctacctaattccattatatctttctgtagctttatttcatcagcatatggtgatttatctttttcacttaacttgaaattcttaaatgatataacttctttctctttcttcttcgaatcgtctgtagaaacttttgtggttgtagcatcttgtatatttctatcttgtggtttttcttgtggatgttctattgttgtttccagggggattacttgtggtacaacttgtggtatttcatctacgattgaaggttgtttatcttgtggttcttctcgagctttaacttgagatgtatctttaaattgctcttgatgtttctcttttggtctttctacacgaccttggggtccttgtggtatatctatacgcctttgaggtccttgaagtaatcttgttggtccttgtggtgtgtccgttggtctttctgtcactgttctttcctgtgatttctcatttgatttcactacaggtctctcctttgttctgtcataatcttgataattgggatattcttgataattatagtcattatattcaccgttctttgcaaacctatttgaggattgataatctttactataatcacctctatatgatggttcataatatgatgaactttcagtatatccaccataaccccaatcattattatcatatgcatattcacccctacctcctctagggctactactaataccggcagcaaaccctcctctaccgcctcttcttccacctcttctatctctgtctctatttctaggcctttccctttctcttcgttttgttagagaatattgatcactcattattctcttgacttttatacaatattatttgaatgattcaatgttaactctggttgttctagttgtattaaaaacaaaatatgatatagttcaaatattaatgaaaaaacatccttttatgttggaaatgaaacaaatttctctttctcgaacagggaacaacaaacaactcttgatgttacttcttttgtttatcattactacagaaatattacaaatgataatcagtaggagtattcatggaggtattctttgaatcatggattagagttacaggttcagcttatggtaaactaaaactggctgatttattatcactttttgatgtgatggaatcattaaatggtaaaaatttattatctactgaatataagaattttttaattgaattcatattggaatgtccatctgctgaggttgataaggaacaattcaatttattaatggaaagattgtttgaatgtccaatacacgatgttataaatgggaaattagttgagaaatcagattataattacacacagacacagtttaatgataatagtaaatacgggaataatattggtgggaattacagagaaagtgaagaattcacacaaacaatgaataatgaaagtaagaaattcaatttatttttgaagaatgaacccattgatgtacaggaacaaatattgagagatcgaatacaagaacttcgtaatatggtatctaaaagtgaaaacaatcaaatcagagattatagatccattgataaaatgaaaaatgtgttaatagagtaccttttaagtttagatgaattaaatatatctagaaatgaaatttcaaataaagaaagaagtatacaaaagaagaaagtgataaatagattaaaggataatgtagagaaacaagatatattgattaaagaactgaagaaaaagtttggagatggaaatagtagtggaatcattgggaaactcaagatgagatttttaaagttgtatattgtcacctggaatatgattaaacttcctctttatgttctgacggggtttttggttttaaattttgtttttgttgttgtatatgaacgtttattcggacgtcatattgataatttgagtgattcttattggggggtataaataagattttatatgtaatattttgctatagtgtgttgtatattaagaaattgtatttaattaatatcattataattacatttcccaagcaggtggtaaagtatctaaacactcttcacaaaatgttttatgacttgatgctaatcttggagatccaaaagtttctaaatcagattgtgtaggttcatgagattttattcttgtaattggattacttccctgtgatgataattttctagtaggtgctggtggagttgtatcatgagataccaatactcccttcacagattttttatcagaatgaccaagattcttctttggagatactatatttctaatttcttgctttaaagtttttgcatcagggaatccaccattttctgttctatcccaaactaaaatccaatctgcattttcttcctttttcacataaaccttgaaagtaccgggtatataggaaggtgttaataatacagatctaatatcggcatcatctgatgtagttgcctttgatgtaaaagtttgtaatagttcttgttgataccacgaagcacgtaaaacccaattacatttaacgcagtataatatagatacaagtgggtattgaattggaggttgttccattgttaagaatatgtgtctatatctgttgtttcattcaaacaattggaaaaagtttaagtgactactaataaatcattaatcattaaaatgactaaattttatgtcagaaattcagttacgggcgctctgaaattttcgccccatcgagtaaaaaaatcactgataatgaaaaaaaacgacaatcaactgtggggttcattaatatacaactacaacagtttctacttcagatattatctttataaaggcaagggggactggtattgggttaaaatattcaatcactgtttttttcacgctacttcttattaacaactaaacaatgtccttggaactgatagtacaacatccggcttacaagcatttacttaaatttgctaattctgttgaagcaagagagaagttactcagattactacaatattttgtgagattcttaagatattggaagtttagaagtgcattctctcctgaaattgcacagttattaccttctttacaacaagcgtttacacttctgaggaaaccattgagaattttaaaacctttaaatcatctcagtggattttcagcttgtgtatcagatcaattatcagatccacttctaagatatggtgaagctattaaacaattaggtttattcttatttttatcttgtgatatcatacaattgggtaaaatgttaggacttcttggtggtaaaggtgttaatgaaaaattaggtcaaaataaattaattaaaaatattaataaatatgcaggtttaatgtggtcaattgcgttaattggtggtattgctaaaaatataagacaatttcaaataattatttcaagatggtattttgaacaaaagaaattaaagaataatgtaaataataatgctaatgctaatgctaatgctaatgctaatgctaatgctaatgctaatgctattgtcaataaagaagttgatgatgacaagaaaattcacaaattaccattaatgtcattaagcaaaatcagaagagattttgttaaaaatgtatttgatttagtaattgcaagtaatatgtatggtacaattactgttagtgatggtttaattggaccattgggtatggcaacaagtgttattgcaatacaagatttgtggaattcatgtcgttaaatagttaacctatttctattatcttgtctcatattatatcacatgtgtattttttccttttttataaataaaaataataaatattaacatcattaatctattttttaataatcagagatactaactttttttctaaatgcctttttatctttcttctgtttcttatccttcaatctattctcattatgacgtttttttaacttatcccaatgttttgtagtttcctctgaaacttcttccttttcagcgccacattcattaactgcttttataaacttattgaaacattcttctaaatttttatctctataccgtgttgtacttgatgttattaatacatcaccagattgtgtaaaaaattgaaattttttatggattggagcagttttgtcattaaagtttttcattatattatcaaataccttacttggaatccatttaccacgagatgaataccaatttttactttctaatctaataattgctttggaatcagtagtattaacatgttgaccacctgcaccttgacttcttgcaaaggttatagtgaaatatttggatatatcattcgatgatgaagtaaataaaggttctttaaaacttattgtagaatttttaaagtttctaataaatattctgggtatggtaatcatctaatacagtatcttatgatgtttactacgtatatatcaaaaagaaaacaccttgaatccattctctgattggtactttgttaacagatttgacttttgatgtgtttccaaattaggaatgtttgccgagactaaaatcattggaagcaacaatttgtcaattattaataacctttgtttagactatacactttatacttcatatatcaattggtacagcttctaaatcaatcaaataacaatctaataaacaaaaccaattcattccctaaagtttcgggccgtgataattgtttatatttggataacaattctcttgtagatatcacgataagctatctaaaaatcaattaatccctcctgatttccaatataaatacaaaacaccccaactacattctttaattttggcaagtctaagagagcaagatgagtactactcagtaagagaaccaattcaataaaaaacatcaaacggagaagtcaaaaacggcgttagcgctgaacaaaaaattattccactaacgacaagtgttagctgctactcaacgttagtggaatttttttacattttaatcacttcacactttggggggactttattttcaatattatattatatacagaaaatatgaatcgccttttaaagattatatccaattgtatcttgactgaaatatgcaattttacagtatcttaaaaatacaattatcacacaatttgaccttcggagttgaaaaaaatcgtgaaaactttaacttttgacacatttcgctgtcaaaaaaattagaacgctattttagaaactactgcacaatatttgttactgtaaacttgtaaatgtctttaataaatttatagcaacttgccatatttgcactttcggatatctccctatctctaagcgcttgtttccgtttttaacaatcaagaaaaccccaccaatcatagaattgatcatgaatatttagtcataataaattttcattttaggtaataatcaacattcatcccataatagcgcgcttaatttttccgttttattttttcactatcaaaattctgtttagttttcaaattttttttcagttttatataaactagttgattctccattatcttttttattgtaaatatattttttattatcgttcatttataaacaagaaatatttaaatacccctaagaatgaaattaaacgaactaaagccaaaggtgtggtctaaaattcgttccagcacttcagaaaataatttgaattcatcaagttacaattctgaatctcaaatagaatatggtctctctaattatgatgatatattaccattcccagttaaatcaaatgaaataacttcaacaagcttcaaagaaaaaaatccttatgataatgatgatttagaatctcaagatgatgtagaaggttccattcatgaaactaaagttaaacgtggattgaagtcaagacatgttgctatgattgctttaggtggtacaattggtactggtttgtttattggtacttcatctccacttaaagttgcaggacctgttaacactcttattgcgtatctttttttcggttcattagcttattctgtcactcaatcattaggtgaaatggctactcatactcctattgctggttcattttgtgcttttaatactaaatatttatcaaaggcaataggtttctctactaactggtgttattggttttcttgggcaattacttttgctattgaattatttgctgttggtcaagttattgaatactggactcatgcagttcctaaatgggcttggatcttgattttctactttattttgactggtgcaaactttgttccagtcagatattacggtgaggtagaattttggatcgcattcattaaagttattgcaattgttggtttcttaatttattcattatgtatggtgtgtggtgctggggtaaccggtccagttggttttagatattggagaaatccaggtccttggggtgatggtgcaggtttagtttctaaccttaatactgataggttcttaggttttgtctcatcctttattaatgctgcttttacttatcaaggtgttgaattaacgggtatttcagctggtgaaagtgcaaatccacgtaaaactgttccaaaagccatcaataaagttattttcagaattttattattttatgtcatgacattattctttattggtttattagttccattcaatgatccagctttaagtagtgatgaaaactttatctcatcatctccattccttattgcaattaaaaattcaggtactcctgttcttccaagtattttcaatgctgtcatgcttgcaactattatctctgctggtaactctaatatttatattggttcacgtattttatattcaatggctggtacaactgcaccaaaaatttttgcaagaactaataagcatggtgttccatttgttggtgttattttcacatctctgtttggtttacttgcatttttaaacgtttcaaataatggtactacagttttcaattggttaatgaacattgccgctttagcaggtttaatttcatggtgttttatcacagctgctcatttaagattcatggatattttgaaatctagaaacatttcacgtgatagtttaccatttaaagctaattttggaccagttattgcatggattacagaatttttccttgtattgattgttttcattcaaggctactcagttttctttgatttcaatgcaaatgatttctttgcactctacatttcattaattatgtgtgttgttttttggattgtctctcaattaactctttacagaaatgaaccatggctaattcctgttgatgatgttaatctggatgattcatcaagacaaatcgataatgaagtttgggaagatgatgaagcacaattaagtaaatctaaactggatagattttgggatttaattttatagaatagctaatttatacttaatgctatcgtgttactacgtatttttgtgctaataataatttatggtgattatgcttatttttttcttcttgtagaaaaattgataattttatgagtagatcatgggaacttataggcggctcgttaatgttgacattggtataattgtattaatgctaatatcattgatgatactaccacaacaccgaaattaccgacctcctctgggtaagatcggaaacacccgattaattgaagtggcactttttccacgaaagccattccactaaattggcttagtgccttaaaaacggcacgaaaaaaaaagaaatgcctttcgcgatattttttttaatttgtccactaaagtcaggttatggcttctaccaaactttagtggacatgtaccatattcaacttttatttgagctcaacagagttgtttactttactcatcttcatctaaatacacagtacatgtaactaaataatatctaactcttatctttactatctaatctcggacttacttatcttatcaactccgtagtcatcgcaattcatcaccatatactcatcgcttatgtaaagggaatggaaaattttttaattgctgtcaccgaaaaaaatttttaaagggtgttaatgccacctcaatttacggtgacttgacacattttcctctgttaatcataatttataatttaatttgctgaggtttcaattgctgttattaatgatttaaattacactacagaattaattgattatttaaggtttagatagagtggttagatactattctataacaaaatataagtaatctgatacactaaagatactaaaagtgaatcatcaaatcacataaaaagaaacgagaaaataataacacatatttctacaagcctaattttttatgactttgtcatttttagataagaattttcgctaattaatttaacttttttctattaatcgttgcatcgatcttgtgctgcttttcctactcttgatatataaaggttactgtctgtccatctctttttttctagcttcatcttatttcagatttaatattatcttttgttgtaatttcttaaatttttcttttctctaatcaattcactacacaactttcaaaacttcgtttattttccacaaaacaatatgaggtttaacgttctttcaaaatctaataagaaagactcaaattctgattctagctcacaatcaactatatcaggttttaataatcaatatgaaagtactgactatcaaattaatgaacaatatcctgtcaagtcaaatgaagtaagtgcaaactttaaagaaaaaaatccttatgataatggtgatttagaatctcaagatgatttagaaggttctataattgaaactaaagttaaacgtggtcttaaatcaagacatgttgcgatgattgctttaggtggtactatcggtactggtttgtttattggtacttctactcctcttcgtttatcaggtcctgttaatacacttattgcgtatctcttctttggtgcattagcttattctgttactcaatcattgggtgaaatggctactcatactcctattgctggttcattctgtactttcaacactaaatatttatcaaaggcaataggtttctctactaactggtgttattggttctcttgggctattacttttgctattgaattatttgctgttggtcaagttattgaatactggactcatgcagttcctaaatgggcttggatcttgattttctactttattttgactggtgcaaactttgttccagttagatattacggtgaggtagaattttggatcgcattcattaaagttattgcaattgttggtttcttaatttattcattatgtatggtgtgtggtgccggggtaaccggtcctgttggttttagatattggagacatccaggtccttggggtgatggtgcaggtttagtttctaaccttaacactgatagatttttaggttgggtttcttccttaattaatgcagcatttacatatcaaggtgtcgaattaactggtatctctgccggtgaatcatcaaatccaagaaagacagttccaaaggcaattaacaaggttatcattagaattttacttttctacattttaacattattctttatcggtttattagttccattcaatgatccagctttaagcagtgatgaaaactttatctcatcatctccgttccttattgcaattaaaaattcaggtactcctgttcttccaagtattttcaatgctgtcatgcttgcaacaatcatctctgctggtaactctaacatttatattggttcacgtattctttactctatggctggttcaactgcaccaaaattatttgcaagaactaataaacatggtgttccttacattggtgtcattttcacttcccttttcggtttattagcattccttaatgtttccaatgatggtactacagtcttcagttggttaatgaacatttctgcattagcaggtttaatttcatggtgttttattactgctgcacatttaagattcatggcaattttaaaatcaagaaatatctcacgtagtacattaccatttaaggctaattttggtccagttgttgcttggattaccgaattcttcctcgttttaattgttttcattcaaggttattcagtattctttgattttaatgcaagtgatttctttgcatactacatttcattaattatgtgtgtcgtcttttggattgttgcacaattaacattctacagaaaagaatcatggttaattccatgtgatgaagttgatcttgatgatgatgcaagacaaattgataatgaagtttgggaagatgatgaagaacaattaagtaaagtatctgttttggataaattctgggacattatcttataatcatctcgatttattatttaatttaattttttatagattcatacagtttatattttacatgcttttctaattacagtttatttcaaaaatttcttccgataattttgtaaatctaaaatcaccttttcgaaattgtacaatagtatatagagcaaagtaataatagatagatacaatatattgttgataaaccgctattatcaaaaacgattgttgacaagaagctaaatcttttgcaaattggaattacttaccgggccgttagtttaaacgtttcgctattaactgatatacgtattccggccgctttcctttacatggcatttccttatcctcggaagttgattagctcaagtaagtttacatcccacaagagaggaaacagcagttacgtaaaaagccacttcaacaactactcgctgtgaactgccattaaaggtgtgcaccaaaacaaaaaagttttgacaggcatttttgacacaaaacggttatactattgttgaaaaaaaaaactttgtgccgtttgaaagaagctatttgcaaattgtgcgaaattgcttttcacggacttcacacaaaatgtccactaacgtcaaggaataccttctgacaaacgttagtggacatactaaaaaatggcttatttagtggaattagaaaaatgtatttcgatccactaacttcaagtaacagctgtattactgacgttttcaatgtatttgactttcaacatcccagttaacacggagttgattgtaatcaagacaaaatttaaaaaagtaaagttataaattgttgcatgtatcctcttcttgtaatcattaactatttctattagtagtttgtactagaggcttcctttaaaggtcattcgaatataataattacttactaatactgcagaaatttgcagcttacacctattggaatgatctcgctgaatgtatactcttaaagggaaaaaatttaaggaaaaaaaaatttattggcattccaggcggcgtaaagtttttccactataatggagctccaaaaggaaactttacacttacaagtttccattaagatggtatagtgttacagggttttcctatatatcggagtaaaccaatgctattatgtgtcaaaaatttatgacaaagttttccaattattcacaatttaaatgaaaatcttttgatggagaaaaaacttgtttgcttttcaacgtttgattctctgtactggaataagttttcaaaagaatttttcttaattaaagtattcacaagatggcccttccaagaaaactgaatagattaaagaagtttagtcaacctaaaaacgaatttgaaagagaagatataacgaatactgaaacttctaacagtaatccttcacctgaagaaaatgaaaatatcagtttcattgaagaaaaaaaatctccatggtcaagttcttataataaaggttatgacttaaacaacgattatcttaatgaagaagttgaaggtgatgttcatgaaactagaatcaaacgtggtcttaaatcaagacatgttgctatgattgctttaggtggtactattggtactggtttgtttattggtacttcatctccacttaaagttgcaggacctgttaatacactcattgcatatattttctttggtggattagcttattctgtcactcaatccttaggtgaaatggcaactcatactcctattgccggttcattctgtacttttaatactaagtatctatcaaaatctattggttttagttcaaattggtgttattggtttcaatgggctattacatttgctattgaaattttctctgcttctcaatgtatcctttattggactgatagagttccagtttgggcatggattttaattttctatgttacaattacaatggctaattttgttcctgttaaatattatggtgaaattgaattttgggttgcatttgttaaagttattgcaattgttggtttcttaatttatgctctttgtatggtttgtggtgctggtgttactggtcctgttggttttagatattggagacatccgggtccttggggtgccggtgcaggtctagtaagtaatgttggaacagatagatttttaggttttgtttcatcattaattaatgcagcatttacttatcagggtgttgaattaaccggtatttctgcaggagaaagtgctaatccaagaaagacagtcccaaaggcaattaacaaagttattgttagaattttacttttctatattttaacattattctttgttggtttattagttccatataatgatccagaattaagttctgataaaagttttattgcatcatcaccatttttaatttcaatcactaattcaggtactccagttttaccacatattttcaatgcagttattttaacaacactaatttcagctgctaatagtaatgtttatattggttcaagagttttatattcaatggcaggtaatacagcaccaagattttttgcaaagaccaatagtcatggtgttccaatttatggtgttttttgtacagctgtttttggtgcattagcatttttaaatgtttccaatgatggtactacagttttcaattggttaatgaatatttctgcattggcaggtttaatttgctggtgttttattacagcagcacatttaagatttatggacattttgaaatctagaaacatttcacgtgatacattaccatataaatgtacaattggaccagctgtagcttggtttactgaatttttccttgttttaattgttttcattcaaggttatgcagtgtttttcgactttaatgctaatgatttctttgcaaattatatttcattacttatggttgttgtattttggatggcagcacaatttacagtttatagaaaagaaccatggctaattccattagatgcagcagatattgattctgaagctagaaaagctgcagaagaagtttgggaagatgaagatgatgaagattacaataatcctaataaatcatggatggataaattctgggatgcagttatttaattaaagatgtatactactttgtactgtgataatttttcttatttataatttaacgcttcagattagaataaagtgaagaagttgtacaattaatgaattatcggtgatttgtcttcttaaagcgctgcttgtcaaagtgtatatgcaatttcaagatctcaacaaattatcaagatcttttctttttttttcttgtaaaccccacatagaagatttataaattgaatatataaaatggaagctccagagttgtcagagccaagtaatcaaatgcaattgaaagatctgataaataaattttggaaaaaagtgaaggagaatttactattatggggtattaatgtcacattattaacaagttcagtatacatggaggtatttgcacaagctgctacaagaccattttcagttcatgatatagctatctcatatccatttgttattaatgaaaaatatgataatttaaatttagtgataataagtgcattgttaccattaatcgtaatgacaacattaatattagttgatcaagtgaagggtaataaagtgaaaagattttaccatacagtttcattatttatattttgtatgagtattaatggatttttaacaacatttacaaagattagattagctaaattaagacctgattttttagcaagatgtggaccattattgaaaaaggatgaaatgaaaactggtattttatatggggatgaaatttgttcagcaccattcggagagtttattttgaaagatggatataaatcttgtccatctggacattcatcagtttctatgtgtggtatgttatttttatcaatttggttatatcattcatatggtaaaaagttaaagaatgataataataagaatttaataattaaatttttatgttttgcaccaatattaattgcaattgatgttattactagtagaatttatgattttaaacatagttataatgatgttatttgtggtactatagttggtatactatcagttgtcattcctgtacattattacaatttgaaggatttagagggtgaagaagagataatattacctatttaggaaatactaagggtcggctgcgtcgattcatattcatagatttaaatttattttataaatcaaatctgaggtttcgcatttttggtgttttggaaagctgagcttccctttggatttgcatcaatgttttatcagtatcttgttttctgaattatttatatttgtagatttctttacttctttttaaaattaaacaacagatagaatataataaagatgtccgaggcaccaaaaccagaagcagcagatagtacacatatcaatttaaaagttactgatggtagttcagaagtttattttaaaattaagaaagttacacaattaaagagacttatggaagcattctgtaaaagacaaggtcgtcaagcaaatagtttaagatttttatatgatggtcaaagagttgaaccagaagatacaccagaaagtttagacatggatgaaggtgatgttattgaagctcatagagaacaagttggtggtgcattttaatttgtataatttgtatgtataattgtttaatatttttttttctatcccttttctcccttattgatagcaatttattataataactgtattctaatagaatgttatcaatgcagtgtatatttaacttcccccctataatcattactaataaatatcatactacacctattatgcagtaaccatcctgtaaataaataaaacacttacgtaatgatagacgcgactatatcacaggcgcgactactgtataaattccggatgtacagatacgcaaatttataagggaaaatattaagggtaataagttatgtaatagttaagttagttcgttctataatagaagtatcataaagaaagtattagaataagtatcaaaacatgtgatgttaattcattaaaatgaggggattccatcatgagtcgataagactgtgaatcgtatatttcacgatctcacaactgaccaataattaaaaaaatttgacgcgtaaaaaatgttttaaaattgttacaatttacgcgttagtattataaacgcgctttttgaggaaatatcgcgttttactcttaaattgtattgttttagtgtacaactaggggtaggttattgaattgattataatattatgataattacagttttcacgagtattattgttattattttctttactttttgactttactaatttgaattttggttatttgattttaataatttgtttcctattcttaccatatatatctctctttttctgaaaaccaatatctatttggactgaacctacctatcattcggtataactcatatccaacaacactatatattgaaaggtcagtttgatatttgtttcattcaattaatcaaattattattaattttacaatagatagatagattagatatcttcccaactttttacattcattcattcaagtatatcacatctctcataaaactatcaattcaattattttcacaaagtaagtattttccacttttccaatctcaaatatcatattccatacatataacaaagtatactaacaaattacattcccttttttattttcattgtagatgatgatacaacattcaagacaaccctcattcgcttcatcagttgtatcaactagtgcacgttctcgtaatacaaattcaatgatatctccaaagaaaagaaatcctgttaaaattggtccttggaaattaggtaaaactctaggtaaaggtgcaaatggtagagttttcttagcaactaatgtagatacaaatcaaaaagctgctgttaaaattgtttcaaaatcttctttgtcaaatgatccaaatcaaactcaaaatactgaagatttacaatatgaaaatggaacaagtcaacatgaacaagaacaagattatgattcagctggtttaagttatggtattgaaagagaaatcattattatgaaattattaaatcataaaaatgttttaagattatatgatgtttgggaaactgaaaaagcattatatttagttttagaatatgttgaaggtggtgaattatttgatttattagtagatagtggaccattacctgaagatactgcagttggatttttcagtcaaataatacttggtgctctttattgtcatagtttaggaatatgtcatagagatttaaaacctgaaaatatactcttagataaagatttaaacgttaaaattgcagattttggtatggctgctttagaaagtggtagattattagaaacttcatgtggttctcctcattatgctgctcctgaaattattagtggtttacaatatcatggtgctgaatctgatgtttggtcttgtggtgttatcttatttgctcttttaactggtagattacctttcgatgatgataatatcagagatttattattaaaagttcaagttggtaaatttgaaattgttgagcctttatcacctgaagcaattgacttgattaataaaatgcttacagttgatcctgaagaaagaattaaaactaaagatattttgaaacatccgtttgttaaaaagtattataattgtgaaaatgatgcagattttatgcaactaccttcacctgaagctgcaattagtccagttaaatcaaaggatgaaattgatcaaagaattttggaaaacttggttattttatggcatggtcgttcagctgattcaattgttgaacaattattatcaccaacttcaaatcctgaaaaaatattttactccttacttttgagatacagacatgatcatttgaataataagacaacaaattcttcaaactcattagattctagtaatactactaataatcaacaaaaaatcaacaatattaagattgatgctgatgatttagtacgtacttcttcaatcatttctaaaacaactgaaaaaattgcacattcttcaccttcatcttcgaatcctaatagcaccccaagaaaaagattatcatatactgcatctactgcaactaatagaccgatttcattttcaaataaaagaaatacaagatcaagagattcattaacattctctaaaatgactccaccatcctcaaatgattcaagtccttcaaagaatggttcaaaacatttagatcaacaacaacaacaagatagatttagtttaacaccatctaaatctttcaatattgatctcaaacgtcgttcattaattgcaattgatacaacaccaactaaaagatcttcaaaaatcattaatgaaacttcaaatcttcaaaaaatgttagccagtaggccatcaaatacaaaattaaagagaaattcagttacttcaaaagttttatcaagttatgctaaattaagtgaatatgaaaattcaaagaaaaatgttgaagactatggtaaaagagcatcatctgattttgctgcattatgtgatatgctatttaatgatgaaagtaaatcaaatgttaaaattcctgattctgaatcaatggcaacaattaatgcaattgttttcggtaacaagaaaaatcgtaattcaaaacgtttatcaacaaatatggcatcatatcatccatcaaattcaattagacctgctactagtaatgcaattaaatcagcattaaaggaaaacaacaaatattccaaaaagttaaggaattcaagtaatccagcggaaagaatcacacaattattaaatgctaatgattttgaagataatgaacgtcgtacagcatctgattctcatactcaaatcaaatctaatttagttgagccaccaaaaccaatttcacgtttagatccaagatataaagcttatgaaacttatcaaaagagaacatctcaacatactgcacatttattaaaaatgcaagaagaagctgaagctgaagccaaggcagcagctgaaattaaaaaacgtgaagaagaattaaggattgaacaagaaaaacttgaattattaaaaaaacaaaagtataaaggtgctgaattagttgataaaacttatgataatcatggtttaggattatcaagtggtacagttttgaaaaaaaatgaagactatttcaatccaccgaaaccttcacaattaaaatcaaatcgttatagtaatttatcaatgtattcaactaaaacttcttctaagagattaagcttctatttgaaagaattagatgaagaaattgcaaaaaataaaaccatttctaaaaaggatagattatctagaatgagtatgattatgaatgaacctgaaaatatacttgaagaagaagatagaacaagtgaattaaatgttatcaatcatagtaatagtatgaatacactaaatgaagatgatgaagataatactgaagaaactgaaattgatattcatgaagaagatgatgattttattggtaagcctagatctgcaagtatttcaaaaatggttgataatgaattatgttttgttgatccaaaccaaaaagctactactcaaccattaataactgaaaagaaacatattggaaataacaataatgagtatctagcagaatcaagtaatataactaatggatcatcagtttattcacctgttcctgcaatccctccaaagattgaagattcttttaacaatgattcaactgcagataatgcaattgaagttccaattgttcccggatctccagtcaagagacaagtcaaggcaaagagaagtgatggtacattcgaagtttttgaagatgcaatcagaaaatcaaagcaagaatttgaagaagttccatcaaagaaatcaattgtttcagttgtagaagctccatctcagccagttttacctgctgaagcaccaaaacctcttaatattgaaaaacaacgtcaaccattgaatgagtctaatgaaacaaagaatactgcacgtaaatcatcaattttttcaaaattgagtcaacaaattcaacctgcaactcctattactgaaagaaaaagttcatttggtaaaacacttaaatcattatttggctcaaattcattagcatcaccagaaacttatcatactatcctttcaactgaagattcttttgaagctttgaaatctttactttccggttggagtcattatgggattggtaatttagtaattgattcaggccgtaatgttttaaaaggtgagattgcaaagaataattcattaaatgttaaatcatgtaaatttacatgtgttgtttctaattctcctaatggatcaaagataacattcaatcatgaaaaaggttctgcaaagagtttttctagacttgttggtgaagtcagacgtattttaattaatgagaatgttttagttcgttgatttatgttttattgatttgttttgttatactattattatactattttgtttgtatctctatgtacattaggtttgtttttaatttgtttactaatttatttttgtttatttttaatctaaagaaatattttactgaaatcgaacgatcttatgtagtcataaatttaaatatacaatattatacaatttttctataaattagttttgtgttcattccagaactttagctgttatacgtttgatgttatcattagggtgacctgacttaattaactcttgaatctgtaattcaaaaacaacactatcaactttaaaatattttggaattgatgaaaactcataaacatcttgaagtagtaatgaaagtaaatatggtcttaatgggtcatatgcttcacttaatggtcttaaactagaatatggaatacctggataagttaaattaaatttaaattcgggaaagaaaattgctgctaaaagatcaaacaattgttgagttgataaaacttttttaacagatctacttgataatgcaataccctttgatgaacaataaacagattctcttggatcgttgagagaactgttggaatcgatttttatttctacacctgatttttcatccactaatgtggtttttaatgtattaggatctgtgctgttattttcttttttatcatcaacagttttgccatctgttttttcggtctcatttttgtcaatatttgcatctgatgcaatttctgtagcttggttggcatgatcttcagtcaatttctcacctaaattagtgagagcagtagtgacatcaactttaatgttatgagtactaacatcattttttatcccttcagattctagaggattaactgtgttatttgttttctcagaagcggattctactttattcatctctatatcttcgggtgggtcgtttgatttagggtcaggatctgctgtctcttgtgcatcctcaaatgcatcatcactttcagtcttttcagacgcagcttctgcctccttctctgtgttttcgggtgctttctctgcaatttcaactgggacacttggttcagattgcttattactttcttcttgttgtctcaaaatgtcctcttcatcttcagaatcatatgttaatcggggaatattttccatcgcaactttgatagaatccaaaacatctatgaagtataaatttttaccatctgttataatagtgtttaaatattcaatcctttgagtaaccttttcacgaggaacaatcttcttaaacatgttaaaatactcatcatctgttaaagataccttaagccataataatcctttaatttttgtgttttttattcttaaaagatcgatatttttactcaaatagttgtcatatccaaacattgaactaaacctttctgaaaaaatgaacggtggcaattttgtagctttttttgataattctggcaaatttttcattatataatcatattcaaatgggtgcaagaatggggttgtgtcatattgattaccaccacatcttttagaaagttggaaaataagggaattgagcaagttatcaattttctcattgatatcagaatctgtatttgtaattgattcgggtaaattagcaaataatgaatattgagctggtttatagctaaaccctttaacttcaggttttaatagagtactctttgatagtggcagatgagtttctaactcggtgtacaagaaatccaatgtcttttccaagacataatatgtttttcttctgacagatgatcttcttttagatgatttttcttttttagattttgattttttaacttgtttggatttgatgctcttctctttggatattttacgttttttcaaagtatctgattctctaatcttttgctcgacggtacgtttcttttttggttttgatattcttgacgctaattcagtcgatcctgatcccatattttcgtattcaatgatatgttctataatggaagtggaattagtcataccattgtctatcgcatcctttaaaatctcgtcatctgattcatcctctgattcatcctcatcttcattatcctcctcttcccctgattcttcttcttcatcgtcgatggtaacaattgttttaccctttttcatattattctcatccttttcactatccacgtcaatctcatgatccgagtcaactaattgttctaatgtacttttccttaagtttttggtagttcccacatgaatatttttagtgcttattttcgaatcataatctgaatctgagttatctgatggaactgaaatattatcagattcggattcatattcttccaatatttgagcatcatcataatccggtgtttctgttctaacataaaatctttcaccgcttttaggttttcgaaatttaggtttggatttgctcataatttttttagtcaattcagctaacgatatatcatttattcgtttatttgtatttatttctagttcattgtcaacttcaggtgtggcacttctttgtctttcttcatttgtatcatcactgtctatttcttcaaccattgcatttattgataattcatttgcctgcttaatgaaattattaaatggataattcattctacccttattataaatgaattcttgaattttaggaaaaattgactcctctgcaactttggcaacaatatcgtttggtaggtttttaaatgtagatggatcataacgtgaaatatttatcataaaatcaattaacgataatagtttatgtaaatcattcaatgatttcattaccattatatcaaacattgcaaagatcaaatcatacttattacttcgtcttaacactttcttgaaaatgggcaaaaattcctcttcaaattcagattgggttaaaagtgatttataggtataatcataattatcaaattcatcaagcatctcttcaagcttatcatcgaacttcttgatataaacttgaacaataggtaaaagtttatcggttttggaggcatcattaccatttttcggtttacttggtagtagctttttttccttatcctctttcgcttctgacattgttgtaattgatgaaactgaatgtgtctttgtgtgttgaatgtgaatgagccaactgatcagttgaaggctcttctgcataaacaacaacaataaaaataattttttgatgtgcatttttgtgtggtgtacgtatgtttttaaaagacgcgtcgctggttttaaaatggtttttattacgtaatattgtgtatctttaactttttttaattacatttcctaattaggcaattaaggtaccagcctcttctcaattgtagttgctaccctaggttaaccgatcgttttgtcataggacgaactgtatttgcaaagtttgaacttttaattttgagcacttgactattgaacttttcttaaacaacttaaggtgcttagattttactattaactaaccacgattgaattgaagttgcacaattcgataaatccttaatttatttcacaagtaagaaataaccgttaaatccacttttcaacatggcaactgcaattattcaacctccaaacatccattcatttactcaagatgtatcttctggtgcaagtatatatactacaaatgcacataatagatttacagcaaatgattttatatatcaatctagtatagcaagtcaaaaacaagatacaagtataaagccaaattctagtggtaaaaaaccaaccaaggagtttaaagttaccaggaaaaattcatacagagggcctaactattatagaattaatagcataaaaagaccggcttctcattctccaaaaacatccccaaatcacaaaagacaatcaaaatttgaaaaccttggccaaattgaaccagtacttgatttattcagtgataaaagtgctgttgaaaatccttcttatatggttcaatacttttccaaaaaattagatttattaaagaaaaaccctgatattcactataagattctaaaagctgaattaaaaataaatgatacaagtaaagaaactactgaagcaatgcaaaaattgagtaagcaacgaaaatatcaatcattgccgataataggttcaaaatctgaaattgaattaaataaaaagcaaagacaatctgcaccagttagtatagtttataaaccaaccgatctctccataaatgaataccttaatacccctcttgatttttaccaacatagacaacaaaaatcaatttcttctacaataacaaaaagtgatggaacgaaatccacaaacagatattctgctaaaagtggagattccaatgattcagtagcagcatctataagtacatcagcattatatcaacaaaaaataacgcaaaagagttcatatcgtcatggtaaagggcgttctctggctactaaacgtaaggatagtgttgtgaaaagacgatatatcaatcctgaagattttaatgatgaaaatgaattattaaatgataaagacattgaattgaaaagaaaagtatcgataatacaacaagagaaatatctaaataaatttggtacacctatattgaagactaatataggtaaagcatcatttggtaataatgattttaataaaaagaaaagagaaagtaattgtggtgctgtaagtatagcaacaggtaatgaaatttatgatgaaatgaaaactaccattttcaatcaaaagttttcaaattggacagaagttctaggttttattaaaaaagaataccctgatttatctgataattcgtatttcttggcgagattaatgcttgagatatatttacgtcgtgttttagctgctagaatagcattaaaacttggttctgatcgatccaagaagggtgtaagtgatgtcctatggattggtctgaaagagagtattgcagcagtttatggtgttgaaaatgcagagttttttgaatcacataatgactacaacatgtacggatcataaattattttttattgaattctatttttttttctatttacagtttttacaaattaattattaatggttctattgtaaaaagtttttgagttcagagtttgcttcatttaatactttaatattttcatacttatcctttgcttcttcacaccaagttttaacatcttcatgtctactactaatgaatttttcaacttctctccttaaagaaggatcataatatgcacattctaatgctaattcagtaacatgtttgaagaataatccttgatatgagttactatctctagcatacttactataccaaacagtataatgagataagtaccacttccataattcttgaaatgatgacatttggaatcttaaacctaataatgctaattcaatcattttaacatcaggattagttgtaacaaaattcaacgttttatagataagttcagtatttttcatgaaacctaatgaattgattgcagcagtttgaacgtcattatctgtaccatttaagatgttcttgactactaaacctggatttctaactaacttattaatttctttataatcttttaaattgcaagtttgtgcaaatatattgaaaactgaacctaatatttcaacaggtactgaatcttttggaccatgcattacctttttaaataattttaatccaattgattgagctgaagaattgtcatattttaatgataaaatagaatttcttaatttgagttcttcggttgttaatttagaccaatcaaggttttcccattcaaattgtgaaatatatttgtttgttaattcatcaacaaaaagattaattttcttataaaatttagcatcttcaaaatatgataatgttgcaatggatttatgtaaatttgaaagaatggataatgcaaatgagaatgcaactttatcaactttatttgatttttttattaatttgattgctttaaaaaatgagacaattgtatctttagtttgatattcagaaccaattgttgcaccaaaagttttgaagaattgcatttgctcaactttattcaatttagtaatatttgtagcaattgagtttgatacagattctggataaataatattagcaatagctgattcatttgcatttaaaaataagaaatcatcattaattgtatcatcattgataatcaaagttctatccgtcatcaattgtctcgctaatttatcatcaacacttttaattaaaagaggaatttggaaaggtatatcttcaacttgacttaaatcagtttcaggataatctaaacaacgatgttgttcaattttgaacttaccactttcatctttagttattgataagattggaaaacctggagttctaatccatgaattcataattgttggtatatcatattgtaaatgattgtattcgtgggattttaagaaattccataaatcaattggtttgaaagatttgaattggttaattttaatgaaatcaccaatcatgagaaaaaatttatcataattttcattatttaattgatcgaaattttcaacaaatagagaagctaaagttctcataacaaagatacccttttcataggactttcttggaaaagtatcatgaattctatttgatttaacatttgaagtaaaaattggatgagtatcaaattgcatattattatttttcaaattagttaaatcattattaataattttataccaattatcatgatcaaataattcattaattatggtatttgacataaaagttgcaaaactttcattcatccaagtatgatcataactttcaaaagtaattaaattaccaacatacatatgaacaatttcatgaactaaaacatctctaatagttttctttaagttagttaattgataatcattaactttccaatcaggtaataagatatgatcattaataacttgaatcattgaccaattttcaacaccaccatcagataggaaaggtattgccattatatctagttttggtaatggataattaacattaaattttttttcaagttgaacgattgcagaagatacaattgataaagcataatcagctctacttgaatcaccaatcattgtataaattctaattggaaaagatttcttagatataggtaatgcgattatgttttcaatatattccatattaccaattgagaaggaaaataatgaagttgacattggtggagaagtttcaaatttaacgattttatttgaagattcagatatataatttgatgattcaataggtaaattagagacacaagataattgagaatctaaagttaaagttaaagaaattggacatttccaattaataatatctaaacacgggaagatgtaacgagaaaaatgaggttgagaatgagttgataataagaataaatcagatttaccagttgaaggattggtatatttagttgagaatacaccctttgtaacatcattataagttaaaatttttcttattgaaccaataaatgagatttctaatgaaaattctgttgattcagtgatattatcgttatcaatttcaataatttcatcagtgaaatatttagttgattcattttccttattagtgacagcttttaatttataagatttattagaatattttaaaacagaagaaatagaaatgatctctgtagtatttaaagtaattgagaatgatttgttatcataagtattatcatttaaatagttgatattctttgataagttgataactactttagcggtataattaggtttgagtttattgaaaacaaaagataaattataatcttttggtaaatactgattagtgaatagcaaagacatgcttagaggagagatactattcgtattggtcaaggtagacacaaatgattcaaccaattcttctagatcaattgttggaacttgcatgtcaatctttaatttttcatgcaagtaagtattgtctcggcgttaggagaaaaatttttgtagattattttgattatgtaatacataagtgattatgtaatgctcacgtgacctgttacgtaatcaaaaaataatatattacataatcaatcttaacaacggtttcttagcaccgtttcttagcagcgaggtctgctactttgatagggatcgttctagaaatttcgtcatcattacagactatcgttagcgggactgtagtggaagtctgtgttgatgatcacgttatacagattacacatttattatacaattatacaatattatttgtaatatagaatacaatgctataatacatgtccctggatatatgttctataatcatcgttatcagtagagaaatccccagtaaaatatagtaaacgtattagtaaaatattagtaaaaaatgtaaaaaattgagaaaattgaaaaaatcgaaaaaaagggtggcgattcctgctgaactgatgacaatataaaaccaccggaatttattcatttttgctcttccaatttttttcaaattaattttcaatttaaagttttttgtttgttttcgttttttttacttctgtttcacttccctcttttagcatcctttgtacggtaccaatctggtattagcgtatagaaaaagcaaataagaagagttttcaacttacaagttatcaaactaaaaaaaacaaacaaactagacaaaactagcttaatttaaagtcatcattaatttttgtgctgattgggataattttccactgattcaattatttataatcatttgttgaatttatttaaatcaaatcaaagattataatattagttaaaagaattgcatggttagcatcaatcaatcaaagaaaataagcaaagtaaactaagaagaaaaagaaaaagaaaaagaaaaaaaaaggttatttaaagttacatttatttaattaataattattttgacaatttattaaaatattgaatcttcatggttaaagagacaagattatatgaattattaaacgtttcaactgaagcaactgaacaagaaataaaaagggcatatcgtctattagctttaaaatatcatccggataaacaaaatactgataacaataatgaaaagcaaagattaactgaaatttttcaatcaatctctgaagcttatgatattttaagtaataaaaataaaagatatttatatgataattatggtgaagatgtcgctaagaatccaaatgataataatttaaatttttcaaataacaataataataacaatactcaatttaacaataatccattcaatagtaatcaatttgatataaatgaacaaattaattcacatatctcacaagctaatgaaatttttaataattttttcagtgatttgaagacaagtgattttatgaataattttaatacaccaccatttggtggcaattcaaatatgaatttacattatgattattcaactgataacataaataatactaactataatgataacaatcatcaagtaaggaatagtaggaataatgatttccatgaaaataattatagtcaaggtaacaataaatcacataatctgaggaaaggtaaagatattgaagatcgaataaattgttcattattagactattattatggtaagcatattaaattatcactttcaaagagaattaaatgtacgaaatgtaatggtacaggtggactaaaaatttatacatgtaatgattgttgtggtttagggtatattgttaatgaaataagaaatggtttaatggttcaaagaactgaaatgatgtgtaatagatgtcaaggtacaggtgaatttataccaaaaaaatatatttgtgatgaatgtgatggtaataaattaattgatactaaagtaatttatgattttaaaggtccaagaggtgttagtaatggatatagaattgtcataccaaatgcagcagatgaaggtattgatttaataccaggtgatataattttaacattaattgatgataaatttggacaaaataataagttcaaaagatttggtaataatttattaacaactataccaataccattatcacaagcaatttgtggtggttatattgattatgaacatattaatggagaaattattaaaattttcattaatagaggtgaaattaaatcaactaatcatttaaaattattaaaaggttatggtatgccaattcatcaaagttcatcatcaattaaatcaaataaaaatgataaatctaataaaaaaaataagaaaaacaaaaaaggaaataacagtaaaaatgatagtaatgataatcattttaataaatatgatgataataaaactactatattagatatcacttcatcagacacgaatagtgaagatgataacacaaacaatattaataataataataataataccaagggtaataaatatggagatttaatcattaaatttgaattaattttcccagatgttaaatcatttacagataaacaatttgaattaatggaacaaatattagcatcaggagttggagatacaattaataagaatccaagaggtggattagtaatttcatcatcatccgatgatgttgattcatcagaggatatatcattaaaaatgagtaataataatttagattcaagtgcatcgagtttatccaaagcttataaatcaagtagtagtaattttaattccaactctaactccaattctaattctaatactaattcaaataatagtgataatggaactgaatctttattaaaggctgcaactcataacattaatgttaataaaataaaaaatcctgtacattcatcaaccatgaaaagaggattatcagcaagagataaaggagaagatgatgaatatgcagaaaatcataaaggaggtgatgataatgatgaatcatcagataatagtaataataataacaataacaataataaagttcataaaattgaatatttgagtgatttaagtaatattgataaaatgagtattagtcttgccgatttcccaattttaacatcgaatgaggcatcaataggtaatggagagaataatatcagtgctaaatctacagctgagacagtcaagaatatggatgacagcttttcaactggtggtagcataccaagacaatcacctaagagggctaagagatgttaaatattacgtaagtaatagtgtataaaataaaaaataataataatggtaaacattgaaattcgcgtatttgccactgaaagagaggctgttagagagagatcattggtaacatggacaatttccacgtttacatctttgatttgaatcatgtttatttttgtttttaaattgtttattcctttgtatttctttctttagataaatcaattactagtatatataaacaatggataagttaagagaaaagatgaccaagcttaagcttgatgttgaatcatggcaagttaaagcagaagaatcaactgataaaattaaagaattagaacaagcattattagaaaaggaaaatgaaattaaatctttaacaactaaaaatcaaacattagaggaacaaaatgaaaaattagatactgaattagaagctcaaaagaaatcatctgaattatcagctcaattagaaacttctagtgaaaatttaagtaaaaagaatgcaactttagaacaagatttagaaacttctgatttaactttaaaggaaacaactgcaaaattaagagaagcagatcttaaaattgaaactttagaaaataaattatctgcaatggaaaaggaaaaatcaagtttagaaactaaatttgaagaattagaagaaaaattcaaggctgctcaatctgaattagatgaaatttccaaacaattagaagatttataatttgaaaatggtataaataattataataataataatagtagtagtaataataataataataatatcagaactgataataataactttattattataattgaaacatcaattgcatttataatcttatattatttaatgtcttgatataatgattcaaactcataaaaaatcgattatttttactcccttttacttttacttttacttatcttttatcttttatcttttattctcttatatattattattttataaatactaaaaggagtcgtcttatttcactcaattgagtgtgatacattcatacaaatttattcaaacgtctttctctcatcgaaataaccatcttgggtctaaatttctcaaccgccggtaaaaaaaattgtgaaacatcaacgggccatcaataaaattgcatttaagatatagagtgtatatatataacgaaataaacattttaatatcattcaataaatatgtcacaaatacccctatatagtgatgagatgagaatgcgtcgacatattaggaatttaaatttagaatctgattatgattcggaatatgcaaatcatccacctccaacagattctgaaattgaacgaatataccctggacaaaatggtaaatcaatgaataggaataataatattgatccaacacctgattatagaactgaggaagatatacctgttatccatagaaatagtagttataataggcttcataataataatcatcaaaatcctaataatggtaatggtaataatttaattggatcatcaagaaatttattatatggtatttcatcaactgcaatggaagatctctataaacaacgaaataaattaaaagattatggattgaaaaggttaaatattaaacaacatataattgttacaatttgtagggatataccactttattcaatgttaaaatcatttattatattaattagtcaatggattaaattaattaaaattccatataataatgttataacagttagagcaactgaattttttttagcatcattatggtgtttagttagtgcattattatcatatattatattagatggattaatgattagatggatgattatgtatgatattaaggcaacaattgttagaattttaagtatgagtttaatgattataatgataattgaaatgtttaattatacatttaataatgcagataatgaattttgtttaacagtttggattttaatttcatgtgttttaacaattattttcattatacaatgtttccaatcaaataattcatatattgataatcaattcaattcaaaagcaaaagatgttgttgaaagtattgaattattaagaaatcgttcaaattcaaataatcataatagaaataattcaaatagttatagtattaataatattaatgaagaaatggtttatgataatgcaaatgatcaaagtaatagtggtattactgaaatttctaaagttaaaaaaaaatttaaaagaaagattgatttatataatttagttgtatttgcagtcgtccccattggtgttgctagttttatatctacaataggactagtaaggttgttattaattcttagattagatgttagtatggaaatatcaagaatacaacaacatattgaatagcaatttgtgtaaagatagataattacagtagtaagagttacccggttttttaagtaaaatttgtgtgagaacatgaatttttcaatattaatagttagctataccttaaggtgttatttctttgattttagttgtaagttaagagacaatatacctctatattagataatggttgtgcatattttgggtaaggctattagaggtaaatatagaataaacgtatgtgtcatttgaaatatgagtttttactttctttttttttcatgaattattttactaacatttaatataatatacagtatggacttactaaaactttctatggtattggacttgaaactgctacaaaattatgttctaaattaggattctatccagatatgcgtatgcatcaattaactgaacaacaaactatgtcaattacaaaagaattatctgaaatgacaattgattcaaaattattaaatcaagttagagaaaatatacgtatgaagagagaaattggttcttatgttggtattagacattctatgggtttacctgttagaggtcaaagaactaagactaatgcaaagactgctagaaaattaaatagaattgaaagaaaaatgtaaatttatcttaatatgaaattaatttaagataacaaaacgtgtatatataaatatggtataatttagtgttaatataataatgactattattactattactgattcggtgtatatattgatacaaaatgttctaaaggtaaaagctgtgttgttcggtttccatcatgcaactcgctcagtaaaaaattattattattatttaactttgtaaacccttatataactgctatttctttcttagtacaagtgtctagatattggctctaagtttacaaggtgtggttactaacaggatttgttattctttgctcttgctttgtctttgttgaaactatttttggaaatttatctactgagactaaacaaaaagaaatgtcatttttgcgtaatactttaaagaaagttaaatttttaacaaaagggttaattgcacttgatgttttattaatcagtgcaacttatggtgtcctttgttcaatatttttaacaattattggtaaaagaaatttagctcaatggagtacagctagattttattataattttttcagttttataatgggtatgaaaattaatattgataaacctgaacttttagagaaattacctgcaattttaatttctaatcatcaaagtgaattagatatttatatgttaggtagaattttcccaaagaaatgtgttgttacagctaagaaacaattaaaatacttaccatttttaggttggtttatgagtgcatcaggtacatttttccttgatagatcaaataaacaatctgcaattgatacattaaataaagcattagatcaattaaagacaagtaaaggtggtttatttatgttcccagaaggtacaagatcatattcatcagaacctgttttattaccatttaagaaaggtgcatttcatttagcagttcaagcacaaataccaattataccattagttgtttcaaatacatcaaatttatattcaatgaaattatttaattttaatagaggtgaaattaatattaaagtattagatccaattccaactgaaggtttaacaaaggatgatgttccaagattaactgaagaaatttatgaaaagatgaaaaaggtagttgatgatttaggtatgagtaatgtttatggtaattgtgttaaaattggtgaaaatgatgaaaatgttggaaatgatgaagaagataatgaaactatattagatgaagaaaattcaattgctccgccacttatttcaactacaaatacaagtgaagcaacatcctcattagctaaatagtcatgtggtatatatcattaataatatataatttaatgtaaataaacgtagataataatgtactacccatgcaatgtacacgataccaccgattatgtaatttttttgaaatctcactttaaatttatttcacttcactttaagtgtaagctactgtaggagagtttatctaggtgaatataaatcaacaagagaaggagaatgttttggaatagtgataagagtaatgatagtgggaaggatgttacaagtaaaaaagatgatataaaagatgatggaccacatactgataataatgaaataagacaaatggaatcacttcttgatgatgtgattaatgataaaaaatctagtagttcactaagaaacaaagctagtaatagagctgaatcattagagttgagtaaatttcctgtaagtagtggacaaaggatataacaatatttacaaattaagaagaataaatactaacatttaataatcataccaataatataatataaattaatatagaaggaaatgtcatgtatgacagcacttgatgaattaatgcaatgtatgtcattaggtggacaaattcgtaattattacagatatggagatcttacattatgtgataaacagagtgaaaaattaaatttttgtttctctaattcacttaacacattggatgttaaagaggttaatgttcaagaattttataaaaagagacttgttgaacagttaaagagaggtagcagtgaagatatatgggaatcaagagattagttgtattatcattaatgtgtgtgtaaatagagtaaataaatcccagtattattattactacctattattatgaaaccgtattattctgaaacgaggcggtgcgcgtcttttttttttttctctttctttttctttttctctttgccctttttttattatcagcttaatctgattaaaaatgctcagctgagttaccgtatcttcatcttaatctacatcttcttttgaatatattcatagattaaccgcttctactcttgttgagtacatctctacaataatggaagatagagattccgaatatcgtcaacttaacttcaaaaaaattccaaatatattgaatttttcaggatcttcaacgacaagttcattatcagttgcaaattcaactttttcaagaaataactctccttttaattataattccaactatgatattaacaatccaactccattaactaatacccctctatctgaaaatattgcatctcctcgtaaatattataatattaatactttacattcaagttcaaatgtacatactggaactccattatctaatcatacaggtaaaactaccaatattagaaaatttactcaaaatagtaaatgttcattctgtgatgaatctttacataatatatttgaaggtgagagaattattgacttaaattgtggtcatggtttacattttgattgttttaaagaattactcaatccaattatgaataatgataataatgatatctttaacaatagtagtatctctaatgataataatattagtaatgataatattcttccaattcctaaaaagaatgaagttcattgtttatattgtgataaaatgactacatataataatgatgcaaatatctctttcgatattcacaataatcaattattacataattatgataacgttttattcacaagtgatttaattgatccaatttcacaattttcaaatattgaaacaattactccttacaatgatgataataacgaaccatcttactcaattcatgattctgatgtttcaagtaatcttgatgaaaatccaataactcctcaaagtcaaatgggtatgaatttttgggatagagaaaatgattcaattatacctttatcaaatgattctgtaaatactttgaaaattgatgagaaaaaagttaataaaactcaaaatggttttgttcaatcctcatttcaaagtgatattgaattaggtaaagtgttatttgctccagaattctcttcaatgaatttaaatgaaactgatgatgtaggtttagttgttaatatttctacaacagagtttgaaacttctttgaaaacaaataataatgaacaattcaaaactcttataggtaaaaataaaatcactaatattataataaataattttgaagagaaattaacagattctaaaattgattattcaaatcttggtagtttaattttatttgatttcattgatattacaatcaaaatggatacttttgaaatgtgtcaaatatatttatttgaatcaaatattattattttggataatgaaggtactaatttgttattaaatcaaacattaaattcaaatgttttcatttcttcaatttatgaaaataagaatgatataatcataaatttaaattcaattaaaattccaacaattcttttaacttctgaaaatagattattaagacataaatggtatgttatattaaataaactttcaaataaagtagatatttcagaaataaatattccactaattcaagtttcaacaaatgcatggaatttaatttcaactggtgatgatgaattagatgatgccattcctgaagatataaaaattgtcaataaattaacttcaaagggtttagatttaccctctaaattctcaaaacgtcaaattttaagacctgaagcaatacctaaaatcataattatggctttaccgttggtaaattgtgaagattatggattggaaaattttgaatttgcacaagctattcaaaagattatcagaattacactaaattcattgaactcgattgataaattaggtattgtatttctaggtaataatattaaaaatctgtcaatgattggtaattattatggttgtgcaactaaaaattgggaaggttgggaatctgttcttgaatctataactggagatgttattgaagaagaaggaaatttatatcatggtagtcaatgggataatggtatgaaatatatcgatcttttagctaatttatgttttaattctaatagtcaaagtaaaactgattacattcatcaaataatttgtgtttcaaatgaacttttaaatgacttcaatatgaaatccccaacggaaagttttaaagctgaagaaaaatcaaatccatttttaatcaaaaggaataaacataatgattctgatgttagtaaaaatatctcaagactttgtgaaaaatttaatgcaaattttgattttatcttattagctgatgaattcagatttgaaccaaatgaaattttcttaatgaatagatatttaaaacaatatagctcaatgaattcaagtgagtataataatagtgattataataataaaatcaaactgaacgttgcattagattttgaaaatttatcagaattgctcaataaaaaaataaatgcattacataaagtcacaatcagaaattttgaaacatgtgttaaatttcctgaaaatgttaagttgttaagttttgaatctccattaggtgaggtcaaaacattttcaaagatgaagtctgatgataattcatatcttatcaaactaaacaatttatcatcgggatttgaaaaatcaatattgtttaatcttcatataaataatgaagatgaatcattaagtagtaaaagtaaaataaatattgcaaattcacatactaaactaactgcagataaattgaaaattgaattcgattcacaatcaaatataaaattattatcaaataactcaagtatagaaaataatgttactttgaatttcaatatagagaaatcaaataacagtgttgagacatatttagataaaccaattattgaaagtgaaactgataaagattataatccaacagatagacgagaaagtgatataaatttatcaattgtttctagattatcaagtgttagtgatgtgtattatgttcgaaggaaaattcaattacttgtaactgaaactatttgtaaggaagttttagaaatcaaatattttgattcagcatcaaaggaaaatgcaagagagaaattcatgcaattaaataataatatttgggaaatggttaattcatgtaataactcaaatacaaataattctggtagtcaaggaattgagaaatggtcagaggtactgacaactaaaattgaagaaattattgatggttattcattaagaaattatcaattatcaaatatgaaatgtatttcactttatttagaacttgaataaatccttaaataggttttttgtacattattttattttattttttacttcttaaatatttaatttctgtttagattcataaattcattcgttacaattaaaaatttaataaaaattgtgtttaattctatttttataaatttctcatgtgaaattttttttaaagtttgaaaacgtttttaatctgtctcttttctgaaaaaacctaatttgttaaaaaatgttttttttgcaaaagaaacacaacaattattattttattaaaaaaatttatttatgagaatatttttccacattgtttaggtaatttgcaacaattttgactcactttaaacaattttttttaattttgaaaattttgaaactttacaaatcaatactaccagcaatatagcgttttttagcaaatgtaattggtcggatggtctagttggttatggcatatgcttaacacgcataacgtccccagttcgatcctgggttcgatcaattgaaacttatttttttattttttttctttcaattactattttatttaaataacattttgtatgtttaattcttataaaaatgaaaatatataatattgagagacaataaaaatattattcaaaacaaaaattcattcttttgtctcagtaatttgtggaattagtttataaagtaacaatttgtagcccttcccaaagaataatggtagaaaaagaaataatataatttgacttaaattaataattataagttaataaattggtataataaagtattttttcagctcagtttaaaaattcaatatttgaaaaatgaagtattttgtcttttgaaccaagaaagaagcttgagaaagtataaattctttcttttcttcaacaagaatagtaatgctagttattttttcaaatatgaagtcagtaatggattttttaagtttaggttcaaagtccaatacattgttaaaattattttcggatatagcagtttggttatcataaatcattgtgttatcaataatatcagttggtattatacatttttcgcataatataataattccaatggataagattcctattgtcataccaactgcaaacatattatttacaatatatccaagtaaaccacatcgtgtttccttttcataattttcatttatagttgtttcatcatcatcatcagttgataaatcattttcaattcttgaaacattttgatttttgctttcaaagatttcagatgagtatgaattaacatgttttagggtttcgtttgacttaaattgaatcatactacaattgatatctgtaatcgaatgaatatgcttatcagatgatgctttgattgaagataaaaatgatttccaacatttatcattttctatattattcaaaaaatcgattaaaggtagcaaatcatcatttagggtattaagataaattgggtcacaaagtttaaaatttttaggtattttcttaaccaattttgaagcagaatgagataaaataatcggaatgcaatgagatttggatacttttggtagcatataattatctttattaacaatcaaaattattatatcagtagaatctgaattattaacaaagaaattaatattgtgaaataactttttataagaagcaaatctattcagcaagatattgttcttatcaccaactattcttacattaatagatccattatctttagcaattaaagatcttgaattgaaaattgagactcttggcattacaaatgatgaagttatagttgttgaatctattgtacgatttagatctttatcagaatctaagcttgaatcagaacctaaagtatcgctacgtccgattgttagggaacgtttaaaaatatgtgaattttcttgaattgttatattattcactgaatcaacattactatgtgtgatatttaaatattctgaaaaatcttgatctcgttgatctacatcgttaccggatgagctagatagaatagatgattcaaagacaggactatcaaatctaattggtgtattcaaataattatcaaaatcatgtctcgttacaggactttcattaccggaggatattatattgctatcgttatttccaaaaagttgatacctagttattggcaattgagaattagatcttgattcttcaaaattagatgcgacattttgccatgaagtaactgaaaagttaagattgttgtccatatcatcatcatcattattaccctcagtaccattaatattattattgctattggtattagtattagtattaataaattctaaattattaatatttagtggtaaataattatgcaaggaattattatttgaaattcgggattgaactgtagctaaatcaatacctctattcaaatcaggatgctgtaatacattataaaccgactcatgagatggtaagacacctttattaaattcattattatctaaagatttttgatcaaacaaatcagcattcattctaactctctccctttccctctctctttccctttccaattccttttctcgtaccagcttcaagacattaccggaaagcattgcaatagaaataaatatagagatagaaatataaatttaaatacgaaaacaaaataaaaatgatcaaaagccaactccggtccctttgccactgaactctcccctatattataaaacaataaaaatcaaaatctattttctcttatcgctactgcttatcgtgttacgagtatttggtgatggccttttgtttacgtttgcccttcctctattttattatgatttatcaacttatttattctcttcttcttggaataatgctctccctgctttacaataaacaatcctctattcaaaatgtccctcaaaacgacgctatttctaatactccgaaagtcatcgatttcggaactttaaataatcaaaagaatcaaaataacgatgctactgctgctacacgtcctgaagagaagaattcacgttctttttggtcctatctcttcaatggaaaaaagaaacaacaatctgataaaatcgatactacctcaactccaactttaactgatgtcgtagataaagtcatatcaatgaagaaaattgcatcctctgaaattaataataacctcaatggtcaaacttctattaatggaactagtgctggtaaggatgataaattgaaggatattaaccaagatgttgaaggtgatgatgatgatgatttcattgatattcaattaagacaactatcttatgccgaagttgcggctttgaattccgttattaagaaaaatccaatatcaactaaaactttcaaaaaatcaaaaacttcatcagatgatactgatattcctgaattaatcgttgttgatcaagatcaagacttaggtaaatcagttactgatttagaaatggttgaaacttttcaaaataatcaaaataatgaaatacaaaatattgataattttgatgataatgatatttcagctgatgatcaatgggaagataaacttttagcaaagagtaaaaagtcaaaacagaaactcagaaacaaaagaaagcataaataataaccgatttaaatattccattcttttaaaaataattatattctttgcacctgatgttcttcccttttcatcttcgttaaactgatcttatcttatcttatcttgaatttccaatagaccctataatgaaaactccaaaaaaaaatgtaaaataagaaaaatatatcaaaaaaataccatgttccactactaatatctttattattgtctctatctctatcttttatttatcatctattgtctattaattactactatcccctctttctaaaattttctttctatatttatatatcttcctctaccactattgtaatgattatttaacgaaacatcttatgtatatttattaacaacatgccatggcatccccctatcacaaagaagaaagatccaagaccctgcatgaatcaaatttcatcgacgaaaatattttcatgatttttcatcactactgattcagcttttcattaacaaaattcctttatatatccaacttatatgtcattagaacagctaattaaatctgcaaccgatgaaggtgcaattatagattcaagaattaagtttgaatatactgaaaattcaggaatatcagcttttattctttcaaatgataatgatacattatccaaagaaaaaccattaacaattgacatacccaattcatttataattaaaccccaagatgcatacaatgatctcaaaatcaatgaaaatgatcttgaatcaactatagcatttaagttttatatagctgctcttaaaactggcattattgaaaactcgaaatttcaaagttatattgatttacttcccagcattgaacaaattcatagtcctttatcattacctgaaaagtccctctatgtttacgaaaatactacattagaagaatcttatattaaagagaaaatccacctattgaaagttgaatttaataaaggatcaaaattaatttcttacataaaattcaatgattatttatgggcacatttaataacaacatctcgtgcattcccatatagaatcattaatccaacatcaaaaccccatgaacttatgttattaccaattattgatttattaaatcataaaccaaattctaaagttgaatggttaagttctgataaaaataactttaaaatctcatgtattgatcaattatctaacagtgatgatattgatgattcaaagattgaaatattcaataattatggtcctaagggtaatgcagaattacttatgggttatggttttacacttgaagaaaatgaatatgattctttgcaattatcactttctgttaatgatgaaataaagaacggattatcaaatttatggaatattcatttacctacaataagtgattatacatttagtataaatgatgatgaagaaacggaaaagacagttgctcaaaacgcaggtgagaacaataaagttattttcttaataaataagttccatcctatacctgatggattacttgaagtattctgctatataagtaaaaatgaagatgacaaaggaatgtcacttaaaaatacaatgaatggtttaaacaagctcaagcaaagtttagaaatcaagtattcaaataaactggataaggttccatcatttgataaagacttaattgatgaaaatgactataataatgctaaaactttccgtaaaggacaattaaagatttacaatttaaccaaaaatgaaataaagaatagggaaaaacaattattaaaagaatatagaaaatgtttcatcactattaaagatatttttaagaaagatgacgagttcagtgaattcttagaaattttacaatggaataaagatgtaagtgaattgaataagatggaaatggaattgattttgagattatggttacttaaaaatgttaactactataatgaagaaaatgtagaagcggaatttgaaaattttgatattaaatggtttttagaattatttaagtttagaaaaggtttagacaatgttggtgctgcagttagtgatgatgatttcatggtagatttatataatcaaatcataccagcattccaaaataatgtaccagaaatattgaaaggtgatcaatggagtttaaatgattggctaataattgatcatttggttattgataattcctatgaaaagggtaaatctcttgaaccgttattaataacaccaacaattttatagagtgagcatatatatcatctataagataattcatgctgtcttatttcaatgtctagcaggaattagtcttatgataattataagaaatagaaatgatgctaaaacaagacctgtaatacgaatgtaaaaccaaaatcccaatctaccttctttatgatatttagataataattcattaacattatcaaatttaccatgtgaagtttcaaaagattgtgtagcttccttcaaaataacagcatcttgcttcaacatttcttgaaattgtattgcttgttccttcaaagaagtaaccattgaaggtaatgaatctattaattcctgttgaattgaatcatgataattgttttgaacttctgtactttgtacttgatcaagctggtcatgtttagtacttaacaatctagatttcaatgtatcaatagattcaccagctgcaaaatcattgaattttgatttaccattaccgatatcttctataccatgattatcgtgatcaattccaataccagcacttttaatctctctttccctgattgaatctaaacgaagtttatcattatgaagtttttccattccaatttcgacattaagtaataaaattcgaatctttctctcggtttgatgtagtttaacatccaatggatcaactcttttactttcatatatctgtttacgcatatattgaatatcttgagaatatcgtacaagagtcaaataaagatccatcaaatcatcatcattgaattttccctcctttgaaacatgtaattcatctacacctcttactatactttgatgcaatgcctccattaccaaaagaaccacctctccatcagatcaatcagatcaaccaacaatctctatattcatgtaactaactctactgaaaatcctggtgcactgctgccataataatttaatttttttagtctcatgttacctaatattcgaatttttgagtgggtgagtgaagcctcttctaattgcttctccgattatgcaataatcttatttccgtctggaggtgttgtattgattgtttaagggtgcatactacgtttgcaattgttatccttttggagtgtttcattaatcaattctcacattcgggtattattatatacatatatatatatatatatatacatacatacatacatacatacatacatacatacattacacttaactttagttagaaacataaaaaaaagtattcaagtttagaaaatttaataatatgggtattaacaatccaattccaaggtcattaaaacatgaatcaattaaagcagctaaagttttagcctcatttatcaaacctaatcaagttttaggtgcagatgaaattattcctcatgaagtgctactaaatgcaaaaggtttagcaattataactgttttaaaggcaggtttcttgttttctggtagagcaggttcaggagttgttgttgcaagattaccagatggttcatggtctgcaccttctgcaattgtaactgcaggtgcaggtgttggtggtcaagtaggtgctgaattaacagattttgtctttatcttaaatactgaagcagcagttgaatcatttgctcaatatggttcagttactttaggtggtaatatatcagtcgctgctggtccattaggtagaaatgctgaagttgcaggtaatgcatcagctaaaaatgttgcatcaattttctcttattctaaaacaaaaggtttatttgctggtgtatcacttgaaggttcagcaattgttgaaagaagagaagcaaatcgtaaattttatggtgatcagtgtaaggcaagatatattttaagtggtagagtggctccaccacctgcctgtgaaccattaatgagagttttagattcaagagctttcagtcgtacatcacctgatgattatgatgatgatgatgattattatgatgatattccttcaacttttagttcagatacagattcaatgatgtcatctccaagaagaggaacttataatcaacaaccaaggagaaataataacaataggtcttataatgatgatttcgatgatgatgatgattatagtgaagattcagctcgtgcatattatagtagagaaagaagacaaaacggagattcaagaagagtcaattccgcttcaacttgggaagatgatgtttttgatagaagtcaaagaggaagctctcaaagaggcggacctcgaagagttgattcatattcaagtaaatcagcttatagaccaacagaagataaaccagattttaatagtagatcaggtaattcatcagcttctagaaataaagcaattgctctctatagttttgcaggacaagaagatggtgatttaccatttaagaaaggtgatattataactattattcaaaaatcagattcaactgatgattggtggacaggaagaataggtaatatagaaggtatcttccctgccaattatgtagaattagtttaatagtcctatcttaaattcttaacagaactctcttctcttttttcacaaataaatttagatttttgtctataattctttgtttattttacgtttatgttgtcacaatttttttcatccttattcttattcttttatattctctttgtaatactatatccttcaaattcatggttattcaatgccatgataaaatgaacatttaatatttgtttatttttccttttaaaatatttttattctatatagccttataaaataaacaaaaaaaagcaaattaggatattaaataattgaacttttacacatgaagagaacatctttctattatattattttaagatatttagcagtttgagtgatttgatattcaagtatcggattagcaacatgaataatattgttatcatcatcaaattgattctttttaacaaaattataaaattcattaaaattattattccaacaaaatttaatgatcagatctgttaatgaggatatttgtggtatacttaacaactcattagcgggacgaatataaagttcaggtttcggaaaaaataatctaatgcataaatcccacattacatgatacatttcactctttctttcttcaagtaagttttgattagtatcatccaatgcacttttttcccttaacttgaccttattaaagttttctaaactttggaaatatgcaagcttatcagaattaacagcattttgaaaagtggcaatttcatacatctttacgggatcaacatatgaaaaagttgctattttatgaggtaatctatttctagtactacttgaattattaaaatagtatgggtatcttttagtatccatattcttttccttagtagaaatttcaattttgatcttgtaacatgaaattcctaaattcttaaatcttctaaccaaatcatcagcttgattatcatcattaagctcaatatatccatatccattgtatttgttacttttggaaatttcacccttaggagcagttgaaaaaaattctgcagttttgattgagtcacaatttgaacaccattcttcaagtctttccttttctttttccaaatcaatttcactaattaataatttgtatctttttttaggatacttttcattccttttagcgtaatctttttcttctcttggaatagctcttgtaacaaataatcttttatcttcaacttcaatagaattcaagttttgaatagttttatcaactgcattttgatttgtcattgtcaccaatgcccatgcaccatttttatctggaacatctctcttcaaaacatctttaactgtaccaaaaggttcaactaaatttttaacaatttcctctttaatattaattggtaaattcttaatgaaaacagagtattgagtactaggagcttgactttgttctgcttttgttttatcaatagagaataaaacatttttttcagcaggttcaactggagagacaacagttccttgctttttagagatcatgtcaagtaatttggaaaatttgttgttggtttgatataaatctctttctttctttggaatatgaattgaaacattaattactttaccatccatttctgtttgattgaattggctacaaatttttaaagcacccaatttttcagaaaaattaataaagcaagttcccttttcagcactatatttacaacttaagattttgctgaatgatttgaaacgatcatacataattctagagcttaaagtatggtccaagttagaaaaaaataagttagtacccaaagtttctctttgttgcttgtctctaacagaaggcataattctaatttcagatcctttcaattttgtatatgataagccgtccgttgctatgtcagcattttgttgagtgttgaagttaacataaccatatcttaatgatttattataatttgtatccattggaatcttaacagaaattaaaccatcaaattttgagaaatagatgtataaatcattttcagtaactgattcatccaagtcaccaacgtataatgataccatttttgtttgattatttattgcagcagggctagcttgaaaaacaactgctttcttttttgaattatattgagaatcatcaattggagtttctgttggtggtgtgttatctgcattatttaaagcttttccaccaagggtaataatatcagttccaaattcagattctgaatctttagaagtgacaaaagattgtgatgattcaggttctttgatttcaatttttctttcttttgaaaaagaaagctcatcatcgttttggaatgctttgttaatttctaagttaatattaacagtatcatttctattggcattagcgttatcatcatttttgtttttgacagtgttttcatctttaatagtgtcttcaatgcttttgtctttttctgtgacctttgacctgtttttttcaagataagttctaatggtggaaaatgcttttcttcttcttgctcttctctctggtgagccagaatcagataaatctatatccgaattacttttactaagattaattgaggaaggatctttagtattaacataattagcatcagttaaatcatcagtactaaaagagtttttgttttgaattgtaggattgtttacttcaagttttgagccaccatcatgagttgcttttgaatttttaaagcctgtagagtctgagaaattttcatcaacagcagcagaggtttcagtcactttgacgtttaatttttcttccttattatccattttgttaaaaaaaagtaaaaccaaaatgaattaaagaagagttaaagaaatactgaaataggtattacaagtacttagctaattatctgtagaaagtgctaccaaaggaagaagtaaataaaacaaacaggagtaaatgaaaagagaagaaacaaagtaagcaaaaaagaagcaaaacaaaataaaaagaattcaatttaaagaattgctcctgtggcaaggcaaaaagggatcaatcactgaagtttgctacttaaacactaataactaaattcaaattcatgttaacgctcagctttttttcctaattgggaaatcaaaagttgccttttttcaaatttgtattacgtaaatattaagccattatacagttattaaacagtaatgatatctctaccgaagatacctctctttaaccaatcaaagaacattagaactctcgttctaatactaacactttgtgcaaaatagatagatctccaaagatacattgcaattaaacctccaaataatgaatgtcccggtagatcgaaaacagctgaacttcctaaatatgctaatgaacctaaatatttatatttaaagggttcattaactgcatcatcaagatctccattataaatttgattcacaatcagagaatctgtcatattggcaatttttgatagttttttacctaaatatttaccttcttgattagctctctgagcagttgctggtaatgctgtaactttagtatcaacttccttaaataaggcctttaattctttaaattttaaactacctttacccgattgatcatatttaggtattaattcctcagttaataacaaagcttctcttgcaagtggattatatttagcaatttcatcacataggaattttagttcagtgtttgtaatctcaaagtttttgatatcattatctgttataatttttgcgtcatcatcctttttatcataacccagaaaactttcaagtttccagccttttttatcaccattaataatatattgcctgacataatcttgtaaatgttcaccaatatctgttctaacagttgaacaatcaccaattgcataaatttcacccagtggagcacctataacccttaaatgtgtatcagtttctaatgctcttttatttctttggaaaggtttaagatcatcagataattgcttggttaatgcatttaaaccaatacccgtggaccaaagacataaaccatatgttacttcttttaattcttgagatccatcgatacccttttgggtatataaaactttatctggtaaaatttcttgaacccttgaattaactaataaatcaatatcatcttttttaaatctattcattgcatattccgaaattttattatcataggtatttaaaatatttgatcttgattgaattatatgaagtgatacttctttacgtaaaatcattggatataaacgtggtaaatcttcattaactaaatcaaatatttcagctgctatctcaacacctgtcggaccaccaccacaaacaacaaaggataataatttctttcgttcatcatcggaagttgttggtaaacatgctttttcgaaattatgaagaatctttcttctaattcttaatgcatcttcagcagttttcagttgatatgtatgttctaaacctttaacaccgtgagtattagtcgttgaaccaactgcaacaactaacttatcataaggaacataaaagtagtcatcactatctacagatttaattttaatgagtttatcactatattcaattttttcggcctttgcaagaaggaaatgaccattaactttattgattaaagatctagtactttccattaaagttttaatatctaaagtacccaccgcagcggaaggtaacattggagtgaaaaggaaataattagttggagaaatgactgtaacatcataatcatcaggatttaattgatttaatagagatactgaaccccaaccacaacctaaaataaccaatttttttttagaactatctttaattttcatttcattatcattacaatctaaattcttagttaagatcggtaatttttcaggaccaccaattggaggattcagtgaatcaaatggaattaacagattttcaggtaccaatggggcagaataagttgtataatcataaataaaaaatccactcaatactaataagaatgaaccactaacgacaccacatgtgatgaagaaataattcagtgattttttaaataatgagactggttgtttgaaggctgatctttgaattgttgatctagagaatgatctcagttgagctagtcttaaggaattaggtttaagtaatcgattattgaataaatgaccattgtgaagaccaatggttgttaatcttttaattgggagcattgtactaaaatgttctattcaattataagatcgatgtttataaatcagaagaaacttaagtctaattataatggaacacacatgtatagtttttagcataaactgttaatataatttaaagtcataagaccacgcttccggaggaatcggaagtagaaaaggtttgatagaaaagaaaaaaaaacctttaatctggaatcgaaacaataaaattttattatgtattgttcaatcgattacatcatcaatgtcttgtgatgagatgataagggaatactatcgttaaaaacttctctgataaaaaatcatttatcttagtgtacataacagagtacactgtttatacaatagaatataatgtatcaattcagaacaaaagaagaagataaaagaagagaagaaaagaagaggaaaagaagaagataaaagaaagtaaaagaaaataggaaaacaataaagaattaaataaaaaaatgagcctcctttatttaacccctccgataaggaagtgttattataaataaagatcactggtaatttcatattgtttataattgtattattaactattactttcttttctttaagtttttaatgtctaacatcctctttggctattaacaaccacaccatcatatgaacaataataatacaccttctgattgtcatttgataattttaacacacggattagtaggtacttccgaacactttgattatatagatgaaaccttactgaatcatttaactttaaatcaccccgataaacattttaaaacatttaaaacaaaatcaaatgaaaaatttaaaacctacgatggtattgatctctgtggttcaagagttgcagatgaaattatctatgaaacggctcgtttacaacaatatgaaaatcttaaagttacagaaatttcaattattggttattctttaggtggtttaatcactagatttgcaattggtattttatcatataaaaaatattttgattccatcacacctgttaattttgtaacattttgttctcctcatgtaggcgttttaactcctggtacaactttaagtattaaaagttttaataaatttgtgccttatttattaggtaacagtggtaagcaaatattcttaaaggattcaattaaattcgataatacaaatatttcactattagaattgatggctaataagaattcaatattctttaaaggtttacaacaatttaaatataaatctctttactctaatatccgctcagatattagaacttcctggtggacttccggtatctcatatatcaatccttttgaaattttagacaaaaatcaatcagttaaaattgacgatgaaggttttatcaatttccctaatgattcaaagttcgaattatcttttgttgaaaattatggtcctgtattattagatgtgaataaaccaatcaaattcacaggtttaatcgattataatattaaatcaagttcaaactcttcaacattgaatgtaaacaatgatatcgaagagaatgaagttaagatatttttccaaagaaaatttaaatggttggtacttattttcaatactttcatctatattccaatgtgggtatgttggttcttattaatgagcatgttacaagttagtacatctttcatcagagtcactaaggaatcagcaaaattaaaggataatttttatatctatcagataattgatcaagtgacaactactgtttcaaatacaattcctccactatgttctaatccaacaacaccagtgttagagccatgtttaagtaacacttatgttgaagaattaacaaaattagagaatgaagttcatgatcagggtgatgtctttttagattcagtcttcgatgcagttactgctcctaaagatttaaataaatctattttcaatcaacctttacaaggtgaaaatattttggaaacatcaatcaataaaatttgttcaatacctattgatgatattgaaaattggcaaaaagattataaagtattaggccaaacaagagaagaagcttttcaatattatcaaattttgaaatcatttaaaatgaacatgtcaccagctcaaagaaccattgttaaaactctgaatgacttgaattggaataaatatccaatatacatcactaaaacaaatgcaacacatgctgcagcaatatatagacacaatgataaaaactttgaagaaggtaaaatcgtggttgaacatttttgtgaaaaagtattcaagattaattaaacataatcatatctccaaattttttgctttatactttatttagaaagtaatcaattatcatctttacatcaattttttccaatttaacttttgaataatgtgaaaaaactgaaagaatgatttcactttcaggtattttcaaacaaatgtttaaaggtttgtaaccaacaatcggcgataattcaaaacaatcaccatgggcatttttcaaaacactgaaatccgtaaatgggaaattctccattccagcagtaattccaacacctaaatatttacagtaactttcctttaatgcccaacattgagataataaatgaagtcttttgtcataatctagtctttcaaattcttgatctaaccattcaacttctttatcactgaaaattcctctgaaatcctttctgtaaaaatgagcaagatcactcaattcaaacctttcaatatctttaggattagctaaatctataccaatatcttcagcttccatattttcattaaacccaatagctattgacaccagtccattttcatctgatatattgaattgatattttttattcaacatctttggtttcccatatttatttcttgtcatttccaatttgctcatcttattctcaaaattactgacaacgtaactaagtattaacatattgatcagcttaacatacctatctaattcattcttgatatttcggactttaagttgagaaggtaaatctaagtttctcaataaccactcaaatttgaattcatcacgaagttgcaaaacactttcatcaatctggtcacctttcaaaagtttagtataatacaagaacagcgtatcatccttgttgattaaactagtcattgtagatatgaaaaaactaatcaatcctacaagaaaaacttttgtcggacataagcaaaaaaactgacgccaaaagttaactgaaattttaacggcaacttttatctttaagggaccaaatcaatctcgttcttttccgtaggcaatgtcatcagaacgtcgtaagatcttaccattagataaatcagttgttaatcttatagcagctggagaaattataattgctccttcaaatgctttaaaagaattacttgaaaattcaattgatgctcaatctacacaaattgaagtaatggttaaagatggtggtgttaaattattacaaataactgataatggtaaaggtatcaataaggaagatatgccaattttatgtgaaagatttactacttctaaacttgttcaatttgatgatttaaagtcaattgcaacttacggatttcgtggtgaagcattagccagtatttcacatattgcacgtgtaagtgtgataacaaaaactaatgaagattcatgtgcttggaaagcatcatataaaggaggtgaaattattgggggagaaacagatggtattaaaccagtggcaggtaaaaatggtactatattagttgttgaagatttattttataatgttccatcgaggttacgtgctttaagaagtcataatgaagaatattccaaaatagttgaagttgttagtaaatatagtattcatattgaaaatgttggattcaattgtcaaagacaaggtggtggtggatatgatgtgaatgttaggcaagctgcaagtagaaaagataggattaggtcagtttatggatcaagtattgcaaataatttgattgatttggatattgaaatagatgatgaaaccagggagaattatgggctggttagctgtaaaggtctgataagtaataccagttttgaaaataaaaagacaattcaacccattttttttataaataacagattagtcgtttgtgatccattaagacgagcagttacatcagtatatggaacatatctacctaaaggtcaccgtccattcatttatatgtcattaacaatcaagccagaaaatgttgatgttaacgttcatccaacaaaaaaggaagttagatttttgaatgaagaggagattattgaattgatagttgataaaattaatgatattttgaaaaatctagattcttctaggatatttatgacgcaacaaatattaacaaacacaaagagaattgaagatgatatcgagagtagaagaaacaaaagaatgaaaataaatgattatgagaaaaagactgaaactccaaaactcaaaccaatatcacaaattaaaaaactatatgaacatgaaatggtacgtagtgattatagtcaaactacattaaatcaatttattaaagctccaaataacacagttaaagaacaaaaaccaatgacgttgctgtcaattaaaactctaagagaagagatagaatcacatttagatgatagcataactaaattgttttttcaacacacatatgttggtattgctgattacaagaaacgattattatgtcttcaatatgatgttaatttatacttagttgattatggaagtttatgttacgaacttttctatcaaatcggtcttgcagattttagtaactttggagttattgaaattgccaatgagaatgatgaaggtcttagtataaagaagttgattaaggatgaaatatatgggaatgaagaagttataaatttatttaaaaagaatctgaaaactttacctgatttagatacagcagttaagacggcatttgttgatatgaaagagatgtgggaggaatattttaacattaagattgatgcatcagatgaaggtaatcctaaattaacgagcttaccattatttattgaaggatacataccaagttggaacaaattgagtttattcttatttagagtgattacaaaagtgaattgggaggatgaacaagagtgtttaggtggaattttgcgacaacttgccttattctatgtaccagatatgatatatgataatgataatgaagatgataacaatagtaatgaagaagctaaagttaaattaagaaatgttattgagaatattgttatgccagttgtcaaaagtaggttcataggtactgatgccttacgtggtgatgttattgagatagctacactcccaaaattatacaaagtttttgaaagatgttagtgaagctgggaatataataaactttttaaatattttaggatgtttataaaatgtataaattaatctgttttggatagtgtttttaggaaaacttggtataacagtaacataactgaactctgtacactagtccaaataaaacgaggggcaataccagagaaaagacctctgataccatcacaagcatgaattgttctcaaactagcaaaaactgaatgtgtattaagttgaatagatgaagttgcattttgtgtttgcattctagttttaacaacatctaaaggagttgtaatcataccagctaaaccaccagctgctgcaccagttaataattcagatagcagtgaaagggttccatcctttcttgaagccaattgtcgaaatttttcataaaatgtaaattgtaaagctgagaagggtaaatctctagtcagtgttgctctataaccataaaacagagcattaataccttcagtacgtacaattgttgaagcggcatctataagacctttgtaattataaccagaattacaataaggattattataacgaccttgcaactgcaatcgtgttttcagaacttcagatggtacataaaaaacacttgaaactaaatcaccaataaatccagctgttaaatatgatatagtttctggaattccataagctaatgcctctcttttaacagtttcatatgaaaggaaaaaaacagctgatgacggtattgaacctaaagcagcggcaccataaccaccatacaatccacgccgtagaccttcctctttaaaaattgttctatatgcacgtaatgtattatcatatttaccattatgtgaagctccctgttgtctagttttaactgtatcaagtgaatgcattgttgtatcaccaataactccacctaaaccaccagctaatgcacatgcccaaattgaaggttcattatttaaatcatcattatcaccaagactatttccttgtgttgaagatccactgggccttctctccgtctctggtaatgtacgaatatcatgatgtttaccgggtacggcactatgtggaatcgtttgtgttgaatttaacgcttccatctatataaattgtattgaccacctctttatcatgcacaatacacaccaaatgcgtcctcaaaaaaggaacttttgaatcaaagatactattagtataacacatcaatccgtcaccataataaatgcaaatgaaagattttctccaacttcttaaagtgagatattggctattaacgcatcgcttcacttgcctaaatgggaacgttcaaatacataatagattacataatacacaataaattatccaatgatagacatcaacactggagtgaacacaagtgaatgaatagatgcaatgacaacgagtccaatccacatcttgaaatagtatacacggaatatctcacttctagtaaagcttaaaacacaaactccaattaatttggtcattgtaataccacttaatgtaatagtaccaatatatgcaacactttccttagccctctcttcagctattccatttaattcattaaaatatttaattaaatgaatactaaactccacacttagtcctaaacaaatcatcaaattaactaatgataccccatttaatgagatgttattcaataccatccatccaataatattaatcataatgaataataaattgatgattaaaatcattgagtttcttatagagccaaagaatatagctgtgattacaccgataactatcataccaattgaaagtaataaaatagttaatcttccaattgtttcatattggtcaaagaaaatatagaatggtgaatatgcaaaaacttttaaattaggatgatattccttaatttctttaacgattctcttagaatttgaatatgctttaatgaaatcatcctgtgatcttaaagctgtatgtagcgttctaaatgcacttcttttaattgatttaaaatcttcatcttcatatatagaggatgaatatggtgctttaccacctaatgcacatggatatgatggtgattcaatccattcattaaaatatttcataaattcttcaccttctggaaatccattcatttgatagtcccaatctttatcagctaaacatgctttacacattcttggtggtgcaaatggttcacaaaattcttcatcatttctaactttgactctgcaacattcatttaattcaggattcatccataaaaggaaatcatcaatccaactactgactggttctgcaatataactttcattaactctactatattctccattaattatattaaccattgaatatgaatcacatttagtaaatttactgcataattgtttttgattatcaattgcggtaacattaaaatcttcaacaataaaataaactggtggtccaacatttaaataatcatacatatcattgaaataattaattaaatatgaatcatttggtaatgcaattctttgatctaatcctaattctaatttaggtattaatgataatgaaattccaaaaacacttaaaaatataatcattattaatcttttaatatctttgcggaaaatgaatggaacaaatctcttttggaaaaaatcatttaacatagatttagaattactatcatcactttcattcaacatttgaattaaattactaccggatcttgaatgataatcattgttattaattggtaaagaaaccgagtttggttcaattttcacaaatggtattaaatcaagtttaccactgagaattctatcttgttctaatgttagtattgagacaaatgttgttatctgtaatattgtattgaaaataacagcaactgttatatacaatgagaaatttttaacagcaggcattgtaacaaaactacctaaagaaaagcaaaagatttgtgataatgaacttaataaaatactaggaccaatattagacattgtctttgcaatcttaatattaagatttaaattattcataatgaataatttttcaatatttttcaattcatttgaaataagaaaaatattatcaataccaattgctaaaattaaaaatggtataacttcaacaataattaaagtagattttaatcccattaaactccaaaatcccattgatgcaaaaactgaaaataaaacgattataataccaataagtcccaaagaaaatttagtttttgaaaaaaattgcaaaattaggttattgccagatactttaccaaagggggtaatgaatgttgaattaacaaatgatatattattatttagttgattcattgataatgaataagaagcataaataaacataataaggtatgatagaacaactattctaatatctgtattggttgatttatttaattctttctctaatgaaacttcagtcatgaaacttaggttgatacctctctcatttgcttcaactgttaaattatttaataaatatgattcaaacatattttcccatgaagatgccatttgaacttgtttactatttatatcattattgttattattcaagaaagtgacgacaattgatgaagattgtaaaatatcttcatttttatcttctgttcttccaaaaattaagttaggttttagtggttgttggaaagttggtagacattcaacaggtgaaccagcacataattgaattttttccttccaattggattcaggtaagtaattaatatcaccataaaaatattgggtaaaactttctaaaatacaagtttcctctaatggtttaaagcaaatatcatcatatgtaacattatactgggtatcattaatgtacaatgtagactgtaaatttatcatttcattttccttttggaaccaccacttaataaaatcataatcctgtaaaattgaatctccagttgaatttgataaaataagttgttgagttctataaaatggattaaaactttcatcaaaaatttgcttttgaatgaaaacatcagaagttggactaacccataaattaataggattagtttcaaattgaatgaaggacataaatgatgtgaatataattattataatggaggttattattaggataattttagggtatgtagaacaaatataacctaaattgtaaaaaaaatgttcaagatatctattaacaatgtaagcctttttggtatttaaaggatgtatatttgctgaattgaaagatattattgagctagtcaaagtatttgtagcttcaattataatctcattatcattgttattggtatcattttctgtatcttcatcattcaaaaatactccacgtttctttgatttattaatcctccaaattttgagaatggagaaatatgatattaataagataaaataagatatgagaacaaaatgtgagactttactatcaaaatgaacatctcttttaggtaaagtatctaaaactggacaaacgagtggacaatctgaacaagcacaagcaaaattaggatcgatatcattacaatctttagtatcccaatctaataattttaaagaagaatttttattatcttgtatatcttgtatatctgtatctatattatatttaaaattaatttgaaagggagaaccacctaattgaggtttaacatcacctaaaaattttaagaaagaagtataatttgtagctccaccaccaattaaatccattgctaaaccattagttgctccaattttaatatttttacaagaattgtaaaattgcaaagaattttgaggattaacataaaattctaattcatcaattgcaatattaccatttgggaaagtttcagttgatgttacattaataaattgagattgatttggagaacaagtaaaatgacaaaataattgattaaaactatgtctacaagctggacatgaagaaataaggggtgcaattctattaagattatttgataaaacatttaattgagattcatcacaacaagtatataagatatcatcccacgataaaccacatacatctaataaaattgaatgagcctctaatgataatttttgagcaggtttattagcaaaggcaggtaattcaggatcaaagggagaacgtttaccagcagaaccataagtgatacaccaaccctgttgatggacaggattatccacagacattgtgcagagaaacgaagataagagaagaagataaaagaaaggaaaataatttaaagaaacaatagaaaggcaaaacagagcctccaaaagcaacacagtgaaaatggaagtaataggaagcgaaatgatgtcagtggcgcttctttaagctgggaaaggaaaggaaaggaaaaatttaaaattttatagtaagggtaaacgtcagagttatgtaagtgtttttctaatgtttttttaatgtttttgtaccttttatctttttatctttttatatcacatatagctcttggtattatatctattataggtacaggatagatagatattatagatagatattacagatcacatatcatagatcaaagatcatagataataaatcatagatatcacttatatacccttttaactcacattacattcatcatcgtcgcttggcaattatactatatttgtgtattgttgtactttcttactaatctagtctagattaacattatattatatcatattatattaataaatgtcatcattaacaaattcaaactctagatctaatccagatatagccttaggtttaagagataataataattctcatggaggtagtactcaaatacttgatcttgaacctaatccctttgaacaatcatttgcacgtactgatgatgtaataccatcatcaacaaataatacaaatttccataatactttaaataataaaaatttaatgaatttatcatcagaaaaacctttaactaaacctcaaagtgatactcagttgaataatttaagacataactataatcaacaaacaattattgataatttatctcataatagtaataatactaatgatattcaacctcatacacataaatctgatacggtattagttttatcaaccacaaacaatcaaaataatattccaatccaagataaaactattaataatcaacagttacaacaacaattaaatgttgatgatcgattaaatgttgatccaaatcaactgaatggtataactcagattaaaattgataatcaaatctctaacaacaataatagtaataataataataacaacaacaaaaataataacaattctcttcaaattcaatctaatagtattactaatggaaacgttcaaaataaatttattcaaccacctgtactgacacctggaggttctaaaagaggtacttcaagtgttttacctccattacctggtataatatctccaggtggtggttcatttattgcaactccaggtatttggaatgctttattccctcaaactcctggaataaataataatagtagtaaccctaacaataataccaatttaccaaatttaggacaattatcaccaaatactctgaatacagctcaacaacaattacaacaacaacaacagcaaaataataaaactttcgatacattacaaaagcaaattcaacaaattcaagcacatcaaaatcaacaaggagaacaagtaagacaacaacagcaacaccaccaccatcaccaccaccaacaacaacaacaacaacaacatcaacaacatcaacagcagcagcaacaaacacaatttcctaatgatgatatgaggaatcaagcagaacaacatgctgaaaaacaacttcaacaagctcaaatgcaattacaacaagcacaattacaagcacaattgcaagcgcaagtattagcacaagttcaacaacaagttcaacaacaaaatcaaaatcaaaatcaaaatcaaacacaaaatccaactcaaactcaacaatcaccttcaattaatgatacaagtaaaatgaaaataagtgttccaccaccacatcctaaagatcaacaaatgtataatttcttaattaatgccaaaagatcaggattaacaccaaatgaaagttcaatgcgtacaggattaacaccaggatcaaatatgacaactaataatccactttattcatatttatcgatgacaccaggtgctattacacccttaactagtatgcttaattcattaaataattctaataattctaataataattccaattcatcaactatgaagattgaaaatggtaatactgttagtacaaataatacagatcctaatattgatttaaagaaaactttacatacgggattaacagatttagttgtaccaacattaagaacaattgaagataatcaaggaataataaatgataatagtatacctaataatatgacaagtactataactaatgaatcaataccaaaaataacacaacaacaaatacttgattcatcaagaatgatacataatcataaagatagtgttgattcatcaattgtaagtaatagtacagccaatacacctggattaattatgaaacctattaataatcaaattttccaagatactgataagaatacgataactaatggaactaatagtaagaaaagaagtaacaaatctataaatggtagtaataaaggtgctaaatctaagaaatccaaaagtgataaagagaatagtccaacatcatccacatcgtcaggagcagcatcaatatcagcatcatcaccaacatcctcaccacaagcgcaagcacaaatacaaacacaagcacaaccaccatctgccccaactccaaagcctaagagacgtaagaatttaacagaggaggagaagagacaaaatttccttgaaagaaacagagttgcagcatcaaaatgtagacaacgtaaaaaggagatggtttcaacaatgaaaaaagaattagataattataaggatgagaataaatcattaagggaacaagttggtatgttaagagaacatgcattaacattacgtacgattttatttgcacatagagattgttcatatttagttgaacaagttggtggaatacaaaatttaaatacagttttaaatgccactaattatgtttcacaaatttcagaggcacatgatcaaccacaaagtattaaagttgaggaagtaccacatttattaaataattctagtactaatgttcaagttgccgttgcagcagctgttgcacataccactaataaagcgattgaaagacaagaggaacatcgtctttcacattagaattttattttaatttgtatagtagataagttaattaatgattagataaagaatagaatatagactaaacatgtagataagccacacttattccattccaatccaatccgatgcatccactgatacatccactgatactctcttataaagaagagtgattgtccattaacgtatagtggatacaccgcgcttttcaattagtatttgtagtggtaaattacgacgaacttcaatgtctactacaccagaggacattctttctacaactgatagtgtacattctgatatgtctttcaattatttaaagaatgctggtaagttcctatgtattggacgtaattatattgctcatattcaagaattaggtaatcaaaaaccaattgaaccatttttctttttaaaaccttcatcatcaattttaaaacctaatgaaggaccaattttagttccaaagaatgtaattgttcatcatgaagttgaattagcttgtataattggtaaaaaattacaaaatttaaatcctgaaacttttggtccaaaggaagcattagatgcaattgatggttatgcattagcaattgatatgactgctagaaatgttcaagatgctgcaaagaagaaaggtttaccttggtcaattggtaaaggttttgatactttcttaccaatttctccatttatttcaaaaaatcaaattattgacccttataatgttgaattaaatttaaaagttaataatgaacatagacaaaaagatttaacaaatttaatgattttcccaattcataaatttattagtaaaatgtcaagtattatgacattatatcctggtgatgttatacttactggtactccaaagggtgttggtccaattaatcctggtgataaagttgaagtttggtgtaaacatgatggtaaattagttgatggtagtcatatgatatttgatgttgaaggaaaacctggtccttatgaattcaaaggggagtaattatcatactctagttagacactctatttattctatttatttattcaatacattgtagatacttattatttattataactctctatactacagtaaatagagaagacaccacttactgcgcagtgaaaattcaattttttttactaaacattaaagaatgcaatgtagtcaaattttctctttaatttaattacttgattataatatcatatcttcattaaaggatcaaacagaataatgtcaaccccagctgtaacaaatccaaatcaacctgtggtggaacttccacaaacaaatactgcaaatgtcacttcatcagttactaaagatacaagaacttcagctcatactcatattaaaggtttaggacttgatgaatatggatttgctaaacaaattgatggtggttttgttggtcaaaaagaggcaagagaagcttgtggtatagttgttgatttaattaaatctaaaaaaatgagtggtaaggcaattttattagcaggtggtccaggtacaggtaaaactgcattagcattagcagtttcacaagaattaggtccaaaagttccattttgtccaattgttggatctgaattatatagtgttgaagttaaaaaaactgaggcattaatggaaaattttagaaaagcaattggtttaagaattaaggaaacaaaggaaatttatgaaggtgaaataattgaattaacacctgaagagagtgaaaatcctttaggtggttatggtaaaacaattaaacatgttatagttggattgaaaacttcaaaaggtactaaaaatttaaaattagatccatcaatttatgaatcaattcaaaaggagaaagtatcaattggtgatgttatatatattgaagcaaatactggttcagttaaaagagttggtagatctgatgcttatgcaactgaatttgatttagaagctgaagaatatgttccattaccaaagggtgaagttcataaaaagaaagaaattgttcaagatattacattacatgatttagatttagcaaatgcaaaacctcaaggtggtcaagatattttatcaatgatgggacaattattaaaacctcgtaaaacagaaataacagaaaaattaagaagtgaagttaataaaatggtttctaaatatattgatcaaggagttgcagaattagttcctggtgttttatttattgatgaagttaatatgttagatattgaatgttttacatttttaaatagagcattagaatcaacaattgcaccaattgttatattagcatcaaatagaggtttaacaactgttagaggtgcagaagatattaaatctcctcatggtattccacctgatttaattgatagattattaattattaaaacttcatcatataattctgatgaaattaaaaatattattagtaaaaggtcaaaaactgaatcaattatattatctgatgatgcattaaatgaattaactaaaattgcattaaaatcttcattaagatattcattacaattattatcaccatgtaatatattagcttcaattaattcaagaactgaagtttcatcaaatgatattgatgaatgtcaattattatttttagattctcaacgtagtacaaaaattttagaagagaataaaggttatttataagatcttatttatataaaaaatatataatatatttatttaattaattaaactaactctctaatttttgacattcttcaatgaattcttttgctgttaaaatatttgttgaaccataacaaacatttttaaaatttgaattactattaattgaattattattaatttgaccatcctttaaattccattcattacaccaatcttgtaaatttgaatattctgaataattaccaccaccaacaatgaaaaccaaactttcattataattattacgttttggttgtcttgaatgtgaacctcttgaaatttttggatcataataaatataatcatcagttaaattaagtaatgaaatatttgattgatttggattcataattgattcagttatatttgtaattggtaaatgagatttttctggtaataaattttttatacctgaaattaatgaaccaaaaccttcagttaatttatttgaaccatcagttaaattaattaattttgatgataaatttgaaaataatgcacccttatttgaattattatttaaattattattatttaaattattatttgataatgttttctcagttaattttgtaaactctttaacttttttaatatattttaatgatgataaatcaatattatgtttcaaaaggatattttcacattcatcacaaaaacttttagataaatcacatgataaatataatactatataagttcttaattgatctaatgaattatcagctttaaaatctttattaagtaaatctaaaaattgtttttgagttttcgagtcatttaaattttgttcaatttcaaagaatgaatctaaatttttcatttctaattctttaattaaatcagataaaactgacatatgtaaatcaattatattttttctaaaagttaattccggtaataatttaattgcttcttgaatatgttttgtatcagattgattatttggatcaatttcttgaattgatgaataaccagttttagaagttatttgttttgaatcatttgtataattatttaattcagtttcaacattttcaactgcatcagggaatggtaatgaagcatttttattccaaaaaaaatcttttggttcaatatcaaattttttagtttcaattttttctcctgaattagtagtatctttaattaatttttcaattataattgtatttctctctaatttaaatatatcagataccatacattgataaatccaagaatgtgagaacattgaagttaaattaatatttctatccaataagattaaaactgaagaatttgtattggtattattgtttgaattactattattattactattattatcataattggatcttttaatattagttaaatgatctcttaatttttcatctaaattttgagcaattgattcagctggaccacctttatttgctctaataattggaattgaacccattgttaaaattgttgaaaatataccttttgaaattaattcaattttattattaattaattcttcagttgattttggattattaaaatcataataaatatttgataattcaagtgagaataaatttggttcagttacgataaaatctaaatattgatcaaaaatttgtataattttatcagatttaccaattaatgcaacttctttagcaaattcttccaatagagatctatttaatgatgaagtaaaattaatataaaattttgaatatttatcatttttcaaatcattaattataattgaaatattttcaattgttggttcaacgaaataaattacaggtacatcattaagttgacttcttctttgattaattaatgaatgcattgtaatacctaattctaataaatcattaactcttaaaactgatgaaataattgatcttgatttattatctaagataagtattttccaaatcaattcattttcaattttatttaaatcattattattatcatcgatatctatatcgatattaagatttaacattttctttaaatttaagatttgtcttgatctcagagtctgaggtgatgatatcaatgacattatagttgtgtaatgggatgtgatagaatgttacgggtattgttgatcaatgaagagataactgtgtaaagtatattaacacgaattcagagagtccaatgttttttcatgttgagagggtctctctcactgttaagaaaatttaattaggaaattgaaaaatttatatattatttcctattgtggtatagttaataagtattgacagagagtatggtagagaagagagtgattgagatagatatagaggagagtaggggtggtaataataatagtaataagagaaataagaatgggaaagaagtacagaaagagagacaatttattaaatattcacagacaattgatataaagaaagtattcaatcttcatatgagagataataaagtgtataatagtgaaggtaatcaaataatgtatattactatgaataagaatgttaaaatacgtaacaagttagattcaattattaaatatttacagaaggttgataaagaagtggataataataaggaaataattatgataagtattaatggagaagcaattcaaaagatgattagtattgttgagatattaaagcaaaaagttaaacaaattggtaatgagatggaagagaataagtttaataataatagtattgctaaagtagtgaaggaaggtaagaatgataaaggtaatgaggtagttagtgaaggtgaattagaatataattattatcaattgaattatgttgattataagattgaagagtgtaatagtaagaaagataataaagataataatataaaggatatatcctcaggggaaggaatttatagtaggaaagtgataaatgaagttttaaaggttgataaagttaaaaagatacctgttatgtatatttacatgaaatttcataaaagtaagagtacaccaataaatagtgtcaatcaaataaaggaattaatgaataaaggatggtgtatacaacagaattaattaattaattaattagagtatattttttgaatgtatgtatgtatgtatgttagatatatatgataataataataatatgaatgaaagagaatagaagagtaagtaattataataataataatttagtatattaacttattaacttatttaaatctttcaattgataaatcacctgggaaagtaccattttctctttgttcatcccaattttgaacccaatcaccaggacaaagggattgataagtttgccagaaaactttacatggagcaaaatcttcacccttaattgcaacacatttatggtaatctaaataagattggaaacagtgtttagtttgattttgttgaggaaatctagcatcgaaacctggagtttgtaatttatattcagacattgtatgtgagttagttgtatgtatgaaagagaagatctaagagagaagactagatattatccaaattttcactgtataagatagatgtagtatagtaatagtaataataaagtggtttgacttagtgagagagagtgagagtgaggaaatctgtgtgaaaattttatgagtcttctgattggttattgggcatgacacgggttttgttgtgtgtctttcagtaccttcttctcttcttctattcttttacggcaatgaccacacgtttgagtgcatttgctgctcttaataacagtgatagtgatagtgatagtgaaggggaaggagaaggtaatgttgttgataatgtcacatttgaaaacactgctatcactccattgaataactcaaatttttcacttagagaaggtgtcaatgtccagtatcaccatgattatatactattagcattacagagtgatgatatattggtaataaagggtagatattccatatctgttatacaaggttctgttcttatagatggttatactttggtacaggggaaatcacttaaaattaatgcttcaagtataaattcattaccttcaattcaatcaaatagttcaattccaatagagaatgactccattttctcatctacaaatacctatacatccataattaaattggaaaacattgataatcattttgatgaaatatctaatctttattcccacgttaaatacttatacaattcagaaatttcaaattcattacaaaatacttcatcatcatcatatacttttactataattattgaacctgaattaaataaatcttcaactttactacatcaacaatggttaaatatatttcaatcaatatttaatgaatcttcaatgtccataaatcatcaatcaatacttactattggtaataaaaatactggtaaatcaactttttctaaacttttaattaatactttactatccatttcaaataaaaaaattcaattattagatattgatcctggacaacctgaattatgtctacctggttgtatatcactcactcatataacatctccacttataggtactatactaccatgggaaaataatacaactacatctactttaacaaaattcattggattttcatctccaaatcatcaaccattaaagtatttaaaacaacttgatcatttaatagacactatccttttatcatcaaataatacaattacaataattaattctcctggttgggttaaaggttttggtactgaaataatttcacatttaaaaagtaaattatcaattacttatcttattcaattatctcatactaataaagatttagatattttacaatcaattgaatgggattatgaaactaaaattttcaaagcattatcattctcttcattatcttcaaattttaatttatattcacctgcagttattagaaattttaaattattatcatatatgcattataatcatgaaaataaaaattataattttaaaccattactaagtaattcaccattgaaagtctcatacactacatcaaaggattattcatcattaataaattacccaggtattttaggatttaccatatttgatcatccattctcttacacagagggattacacgaatcattagaatgtcaatatgttgcaatagttacaataccttcaacttcattaactactaaattttcatcaaatattttaaaacatgaaaattgtccaaattatataaatgaaacaatatttcattcattatcacctcatattaaattccatggtttagcattaatacattctatagacacaaaaaataatacaataaacatgtacactccaatagattttactaatataagagataatttactcaataataatgaaaaattattcatccttaaaggtagagaggatacaccaattgaagaaatttacccagtgcaaatattaaaggattctgcctcttattggagtagtttcggattagatgcattaccatatgtaagtgctagtttatctaatgaagtaatgggtggtaagatatcaactattagaagaaatattcaacgtagatagtatagtaaatagctttatatagacttaatagacgcagtgactaaatttggttaattttcccattttcttatctccttgattgattgttaaggtattgttgggtcattcatcttctttatcatcttctttatcatcttcttcaactaacctctgatatgccacatactgctgaatacttaccacatcaagaaactgaaatttcatcagttttacaaggtggttataataatccattattaagagcatggcaacatgagagacaacttcaaaaaaatatgtttattttcccattatttatatcagatgatccaaatgatgaaactgcaattccttcattaccaaatattaaaagatttggtgttaaaaaattaattccatatattgattcattagttaaaaaaggtcttagatcagttattttatttggagttttattagatgaatctaaaaaagatttccaaggtacagcagctgatgatcctgaaggaccagttattcaagcaattaaagcattaaaggaaaatttcccatctctttatattatgtgtgatgtttgtctttgtgaatatactgatcatggacattgtggtgtattatatgatgatggatcaattaatactgaattatcagttcgtagaattgcagcagttgcagttaattatgcaaaggcaggtgcagattcaattgcaccatcagatatgattgatggtagaattaaggcaattaaaagaggtttaattgatgcaggtttagctcataaaatctttttaatgtcatatgcagcaaaatttagtggttcattatatggaccatttagagatgcagcaggatcatgtccatcaactggtgatagaaaatgttatcaattaccatcaggtggtgcaggtttagctagaagagcattaattagagatatgaatgaaggtactgatggtataattgttaaaccttcaacattttatttagatattgttagagatgcatcaacaatttgtaatgattatccaatttgttgttatcatgttagtggagaatttgcaatgttacatgcagctgctgaaaagggtattgttgatttaaagagtattgcatttgaagctcatcatggatttttaagagctggtgcaagattaattatttcatattttacaccagaattcttagattggttagatgaaccacaagttttataaaaatagaaaaaaagctaaagaatattattattcagtattatacagttatgctaattgtggtactttactataatcattattattttccactatttcatcttcaccctcctctatactatcttgttttataattttaggaacatttggtaaattatttaatttatttagtttattcttgtcaatatttgtatccttaatatcagtttctttattatcatttattacacccatttcaatttctaatttccttaattcatcatcaacttctaattcttcaccatttgttaataaattacctaatttatcacttaattcattttgataattaattgcctctattgaatcatccattattttctctaccctttcaatatttaattcattattaatctcttttaaaactttattaccttgttctaatccgaaaattatatctttttcaattaatttaaattcaattgtgtcaattaattcctctaatgtatcactttgtctttcaagattatttaataaagattcttgtctcttcttttttcttaatgttagttttgccttatctaatttattctctgcaatgcattgttttgcaataattatttctctatctataactgattgaattttcaattttgatttatttaatttatccctttgaagttttagttgtagtatggctttatcgtgtgatgttattttaatattagaagttgtattacccatattgcttagtatttattcgatgatcagtgataagttattcacagctaatgatttattgatatatatatcgtggactgtattactattaaagcggataaatttactgtgtgttacctaagcacataataaaatttattgtgggaaaagtttttttttctatttcttttcgttttttgtttcttggagatattttacaagttatagttcttttacccgtatattatactgtttcttggtaaagtaaggacagtatggattcacagaaatatttggaatcatatggatggaagaagggggaaccattacaaaagggaggattaaagaaaccaattttagtctcacataaatttgatttaaaaggtattggacatcattcaaatgatacaatttgttggtgggaaacagttttcgatgggcaattaaaatcattagatgttaataaagataaaggatttgaaaatgatgaaaaaatacgaaaagagattgaaaataatgaaagaaagaaaaatagtccattatatcaaatgtttgttaaaggatcagtattaatgggtacaattgataaaaatggtaaaccattagtaaaggatgataataatgctaatgggactaagagaaaagcaggagatattagtttaggagatgatagtggagaacaactgatttttttcgatagtgacaatgaaagtgaaagtgagagtgatgatgaagatgataagaagagacgtaaacgtcgaaagcaggagaagagagagaagaaagagaagaagaggttgaagaaagaagccaaacagttaaagaagataaagaagataaagaaagagaagaaagagaagaagaagtcgaagaagagtaaaaaataaaaagttgagccccgtttgaaaaaaaattcaatttaatcgtacgataactatattaatattttatgaattcacatataattatgatgatgatgatgatgatgatgataacatacttctattatctgtatctgtatctgtatctctttctttatagattatactttctgtaacaatgcttaccactaataataatatatctgctattccctcaggattgtttagtaactcattttatactaataaatacgttcacaataatagcaataatagcaactacaataataataataataataataataatattgctaatattaacattactgaaaatacaaataataacaacttatcaaatgatattttattcccgaatgaagacactctctatgaaacacactcaaatcttttaaactcaaatgatacatctataatatcaaatcatttatcaagttataaacctgatatgaatgttcaatttgaattacaaaatcattttaaaaataatcactcgtatattaataatatcaataataataacaattccattattaacaataccaataaaatttcaaaacctttcagaaataatagtaatagtagtaacaaaagactaaatagtacaactaacaatatcaataataacaaacttaatagacaacgtgaattatcaccagattattataaacctgcagacccatcaactgatttatcaaatttcactgaagaggatgtaatagttttaaagaatttactttcattagctgaaattcataaatggaagtacatctcaaataaattatcaaagataagatcaaagaaattaaatactgaatattgtattaataaatttcatttaatgtataatttaccattcaatccgaaaaataattcgttaaattcaaattactttctcaaaatgaatgataatcatcacaatcataatcataatcataatcacaatcatactcatcttgatcataatataagtcttgataacaacaacaccaatactgaaactgaagaaaaggaagaaacttttgaaggtatgttaggatcctctttaccttatattgtatctaaagatggttggaatttaattgatcaatgatcgtattgttatgtcatttatgtttttatgtttttttacttcttcgttttcttttaatctttctttttggctttttattcagttctatcattggaactttcttttctatttcttctaatattttataatacactatttaaaacaataataataataataataatatgaaagaaggatataatcttgctaccactttcagtaatacttgctattttttttctttttttgattacgtacatgatcttaatttccaatatcgatcctaaggtctagctagtctcaccaattcttccttttaacaatgtttaaaagatacttaagtacgatcaataaagaagctaaatatactcttgaatataagaaatatttaataaattcagaaaataaacaagttcaatcatttttccatgatttaccaattaattttaataaaaatgaaggtactgttaatatgattgttgaaattccaagatatgaacaaggtaaatttgaaatttctaaaaaattaccatataatccgattgttcaagatacaaagaagggtaaattaagatttattaataatatttatccatttcatggatatccatgtaattatggtgcaatttcacaaacttgggaagatccaagaatttcattaaataataaatattttggtgataatgatccattagatatttgtgaaattggtagtacgaatgtttcaaaacatgaaattggtgatattaagaaagttaaaattttaggttgtttagcaatgattgatgatggtgaattagattggaaattattaagtattgatattaatgataaattaagtgataaattaaataatataaatgatgttgatatttatatgcctaatttattaaataatttaaaaaattggtttcaaaattataaattaccaatgaataaaccaattaatcaatttgcatttaatagcgaatggttaaataaagataaagcaattgaagttattgaagaatgtcatgaaagatggaaattattagtttctcaaacagaaactgagaatgcaactaatgattaccctactgcatacaatactacactaattgatacaccattatacaacaaagaaccaataaacttcacttcagagaatcaatttacaggtaaagataataataaaccattagaagttgaagagatctattattataaatgaaaataaatgaaaataattactggtgcacagatttcgctattttttttaattttttttacttaaagcagaacttgccctgtgttgacatgaatatgctcagcttgttttatatcagttctctatttctatttccttgtatatatctaccctttattactgtaattaactaattcacagagtaactggattgttcactcttttctgcatattcccgtattttcaaatatgttcaaaacatcctctgatgtgaaaatttcaccagattggttgttattcgataacttgaataataatttgatttcatcaaaattaactactttagatgatttatcaactattttaacaaatcataaggacaatttgatcactggtaaattaccttatcttaaggatgacaaaatttcatctaatgatctcacaaaatctacttcaaatgattataaaaatcatatagacttcatctcacagacattaaatttagatcatgcaaaagttactcaattagtcaatcatttttcattcactgttaaaaatgtttcaataaataatccagaatcatcttattcaccatcaaattcaaatgttttaaattatttaattacaatgattttcaatcaacaatctctctatttcaaaatattattgaaaattgttaaaaatgaatttaatcaacctatatttaatgaatatgttgaattaataacttcaaatggtcataatattattgataatttaattgaaaacattgttcatatctctaaaatttacaattctttaaaatcaccaaactctttgaattcatcgaataattttgatttctcgtttattgatgttataaaagctaacctttcatcattgctgattgacatattgaacttttctattcatataattttaaattcaaattcaggctttaaaatatcttcagttgaaaaatggatatcattaatggaacaaactgattttttatcttctttgaatttcaattgttctaatgaaatattatcaacaattcaaagtttagcaactttagtaactctcctattcttagatttagaacataacacaggaactatcgatgataaggatggatcttttctaagcaatccaattatcttaactaatataacaaatcatatactgaaaacaaaggctaattcaattatcttatatgcttggtcgattattttgcatagacaatcaattatattagatttattaaagaatgatccaagggccaaacaatatcaagattcaatatcaaatacagtcttgaaaaatttagaaattgtatctctttcatttgctgaggaagcggcaaaattagatgtttgtcaatctttaattaattgtaatgatttgatatcttatgatccaatttatccaaatatattaggtatttttgtcactgcatttgtcccatatattgaaccaacttatccaattattaaaacaatttctacaatcatcaaaaattcttcaaataaaattgttgaaacatttttttcaaatccttcaactgaggaattacttattttattaaaagctaaattacccttacaattaaattctttcttggaattaatttcaattaattcaaatttagctgttgaagaattaagatcaatacctacttatatggtttcagtcgaaacatctaaattcaataaaatttataaaattaatgatcaacaacccgagttagtcacattaactgatgatttcataattaaattaccttttgaaaatgatgaaaatgatgctgcattattaatgaaaaaaggttcaaacgctcaaattttatcaactaataaaaatcaatccttagttttattcttatatgaatataatggttggtcattattgggtagaataataaaacaattatcaaataaagtatcaactgatgaattagagagaaatcaaactagaaatgttatttatcaaactttaactaagattttcctagaattagacaaaccagtcattgatttaattttcaattcattagattcattcattgatgaatatcacactattgatttatttgttaaaacttttaatcaagctttattattgaaagatgcagaattatcttcaaattgtattaatttatttaatgtgttggttaagaaaggttatacttcaattgtttggtctgtcctgtattcatcaaacttattctatatcgaacataactctggtttagcattcgatataattgatagagttgaaactttacaaggatcatattctttcactattagtcttttagaattagctaatacattgttgaataactcattgattttaaaacttgatactgataaaaatgttttaaaagagaaaattataaattttttcactaatttattgattcaaatttttgaattatttttcaattggaaatacattaatgaacatgaaaagtttcaaattggtaatctaataactacatttttgaataaaatttgtaaatttggtactaaattcaactcaattatattcaaggaattatcaaatatttatcaatcaagtttccataaaattgttgcgcatttcttaataggtgttttagatgatccagtttccattaacccattattccaatgtcttaatttattatcagattctacatctacttattctcaatattctaaaactggtatattttatgaaaagtggacaatttcaactattaagtttttctcacaattgattaaaacaaggagaattgcagatatttcaattccttcttcattagagaagaaactttacatagatctaccaaatatcataaaagcatatattttatcaagtaattataaatcagaaatattcactttattaactgaattagtaaatggaaattggaatgataaaccacaatcaatgcttacacatttacgttcaacatattcagttattttattgaactgtttgactgaaaatatttcaaataataaagctaattatcaattgaaaatatcaacttttaatttaatttctgcaatcatgagtagtaatcaaaagggtacttcattatttttgataactggtaaactaatttcaaatgaaaagacagatatctcagtcagtgatgtttcattatataatgcaatgaaattagcagttactgaaactattgataatcagtcaggttatacatatcacctgttacaagccgtttcattaagtttgaaagtgtggctcggtgtttgttctgatgctgacaatttaacatttgttgaaaaattgattaaaattatcaacaatgatagtaaagaaggtacgaataaatggagagttggtataataacaaaatctgttgaaattgtctcccaatatttagttgtatcgcaagataaaagtccaaaatgtcaatccaaaatctttgaactattaaattcagataaattcattgatcaactcaaatctgaatttaaagttcaaaactatgattctattttattcaaggaagttgaatctcaattagctacaatttttggagatttcagtttggagaaatatcaaaatgataaaaatgatttattttcatacaccaattatgtatttgatgataagctattgaattggattgttgatgaaaaaaatgttgaagttttcaataaattacactcaaatttaatcaaattggataatcaaatcacatttgttcatttccaaatatcattagcaaaagcttatggtggattaataacatgtttctgtaatatcaattccgccaaaatcaatttatattatgctcaattagcatcaaaattattagaaatcaatgatgatgaaggtgtattggtggaatttggtgatcaaatatataatatgagaatggaattatcatttttaatcattttcactatatccaaattaagtgaaaaaccaaatgatgataatataactacaattttattatcatgtttgaaattattatcatcaagagaagtaaacttctataattatttgaccacaatcaatgttgggtattataaaccgttattaagaattttacttatatcattaccaatgattcaatcaccaaagattatttcagaacattcaaatttattgctagatatattcagcgataatatttgcaaaccaattacagttttatttaataatattagaaatcaagcattatcaattccaaatttcaatgaaaataatgcatcatttttatctaagcaagttgatgatatattattagttttatcattaacacaagagttttttaaacttaaattaagtaatgaattttacaataatattggtaaaattttaattaattcaggtgcatatagatcaatttcattaatgttcacatcatcccatttgattaaactaaataacgaagaagtatttattgattactcaatggcatttatttatgaattcattcaaaacaaaaatatttctgagacattagttaataatggtattttccatttgttaatggaatcaccagtttcattaattattcaaaagactcatgtaacaccatattcaaataatttaacaattataagattacataaactttggattaaaagaataatgccaataattttaactattgcatcacatttcggcgataaaattatattttacattacacaatttgcattaatatttaaaaatcaatttaaagatactttacaattttggttagaaactgatagtttaataagtactgaaataattgaagaaactgaacaaattattctgttggctaaattattaaatgcgctagattgttatacctatgcaagtactgaattgggtattaatgttgaagatgttaaattagttcctgggttagacaatatacaagaaagaaagatattcgttaatgcattgaattatcttttatcacatccaaaatatctagcaatgaaagttagaattgttgatgacaatatttcaatcgcacagataaccaatgaattgaattctatgaaagaatcattacttatgtaagtaagttaaataagtaagtacgttaataatcttatagcatgtatacattatatagaaaagtttttattagaataatagaaaaaatagctgtttaagtgtaaacttcatcatcaagtgatttatcaattggtgaattatcttcactgtaattttgtgctacctttttgataattttccatttttctttatcatattcaccatagtatccacttgggactgaactattagatattgtagatttatcagttccactaaacactctttgtgtatgagatttgataggtagtaatatatctgataataatggatttctttgatcatttttaattgttgacaaatttgtaaatttagtcacattgttattattatcatcacccattttggttttaatatcctgtaatgatgagaatgatagtaatttcttattcctgtaatttggtgttttcaacctaagggattttttctttggtgataattttattgaattagctaaattaacatcactatctaaatcattatttgaaatattggagttcaaatcaagtggtgatataggttctttataattcataaatttctttaatggactgtgagatttagttttaatcgttgacattgtcgaaactgaatttgatttagtgtgagttaatctcagtgaatctaagctagtcctgtgttttacttgggatggtatcaaggctgaagacgagattgaacctctcaatactcttgtgaatacctttttatttgtagttttactgaaactaccccttgatgagctgctcattttagatattgattcatgatgttttaatttttgcatatcattttcgtgtatttccttcctcagttcatctagaagaaagttgttttgtttttcgtagtggtgataatcaacattattgttttgataatcattgatggttaaattaatgacttggtcattatcaatgagtggtatgtcaatttgagtcatggttgagttctgtaagaacatctcattatttgatttccaatcctctggggaaatgttttgaagtgtacttttcagtggtgtttcaatgtttttatttgtgaatactggttctgaaatatttaatagttgaattcttttgtcttcgtcgtattcatgatcatttaaaaagttggggaaatgataatcgtttaaaactggtgaaacattttctccttttggaaattgaaacttcgaactatcaattatcgaatctgctgttttttcattctcgttcttgagctcttcagcaaattctttagatatatcatctaaatcctcaagtaaatgcatatctttagtattaagtaaattttttgatatcaaaggacctatatttgatcttaaatttggcattgatatattatgaagtaattcatttatatttttatttacattaatattggagtttgttgtagtatctccaagttctgattgatttgtaagttcgcccgattgtgagataattgatttatcatttattttaaacatttctgcaagttttaagtttaaagtgtttttgattggaccgttgactttctcattttcaccttctaaagttgaaatgatacttgaactgtatttggaattagctgttgatgggcattggccggtctttattgaatctgtgaaaactgatggaactctagtatttgaattatttgaactcatcattatttctaaatcttggcgtttttcattttccgttgaaatatatggaaaaaatattgttaatgattttaatattattgaaatgatgaatattgtagtcaaactgacatgcaattgtcgtatatgtaatgaatcggaagcgcctgtatgactgctaaatatgagtgaatttatccagtaaattccaacaactgttgaagcaaaattcagaaaacagttgagaatataaaatagctttataagtttagttgcaaataaagaaggaaaacatatccctgataaaagcgaaataattagtaaagctgataacccttcaaaaattgtaaataatagcaatgggacattaagaaaatcctgtgatgacaaaagtgtgatagataaagcgccattaactacagtcgatactagagatggaattaatgttattttagtccaatgtgatagatcatacatgataggtcatattctaacaccaatttttcactatcttaaaatgtggaaacacgatatttaattttaaactaaatcttatatgaatttaaagagtttaagtcactaaaaatgggtatatgctagtgtagaaatgattagcttgaatttcagaagcaaatttcgaagaaattatgcaggcaatacatgtttttagtctaagcaaaagttgcagattagagataagtttaagtaaataaaaagaattgatgtttatctttttcccaaaagagtaatataagtttcaaaattactgaaaacagtaaagatccataataaatttgcaaaacttaaatgctcgactaattatcgcataactaagcggcatctaaacttttctacttttcacgctttccttcccttaatcctgttatttctctattgtcgcttaagcgtagtaatgggccgttataatgaagttaattccacaactttgtttgtttcggggaacagtgttctgcattttttaaaatattgtttttgtccttctggtatagcgagtcggatatcacttaataacaatctagcattctcctctttgaaattgattctgtctttaatataaaatgttaaatgaaacccttcaactaggtgcaataaatatttcctccaacaaatacccataatagtatactgagcagtgtttttgtcaaattcacctctgattaataaatccgtaactgtgttccaaacagcaatatgatcttccccatatggaatattgaaaacatattccccatatgatttgaatttatttcttaattgcagaggtggggtctcatcatctctaagaatataaattctttcgtttctttcaacaagttcattcatgaacaaatattcatatttcttttccgtttttgtgaaagtattataatcagttattttgtgaattactttatactttttagatttgttgagttcatatggttgacacacccatgttttccaaataaaatcaagtttcggggttgtttgtgggcattggattctttcaaatctctcaatatctaataaatccatttgatggtttaaaacacttttgaaattcatatttccctcaactggttccatactttgatttgtatcaacattcttatgataagctaaaactccaggtacattcaatgaatctacagtcaatgaagcatccttaatgcgtaatttacctttttcacccctattattctcaccatctgttgatacttcattgtcactatctaaattgaaattcttagataataagattgatttgttttgctctgttttatcttcccattttctatttgaattagtatgattagtttttgaatatgggaatgtaagaaatttatcaatatttttcagctgttcaacactttcttcattattattaagaaataaataaattttttcatcattgccagtttccttcttatttttaacatcaccattatgatttgcagttttcaatggttcattattgtgttcaggaatggtatcaaaaactaaggtttcacttttattttctgagtcatcaaaatcatcattctgaataggcttataggttttcaaaatttgagcagcttgagctgtactaaatgtaacatggtttttagttttcttttgatgttttgacctagatcttactgaaaatacagaaaatgttcgagaaagtgttctcattgatgaatcaatatcaaaaccagttgattcagttttgtctgtatttgaagttttagatttcactccattattattaataaaatcatgatggttaacaatattttcctgatctacactaatttcattagtttctgtttgtgttagtggagcagatatatcatatagattatcgaattgccccttaccacctctatttgaagaatcattgattcttactgaaacttcattattatttcccccggtactttcactacttattgcagatagattatcttcagctctatcattggatttgtttttctttgaagaagatggtttcttttttttactccaggggaaatgtttgaataagttcctaattgatgatctccgttgaagtgttgaaggctcagcactagtatcctcctttactgacaaaagatccaaaacaatgtcatcattaactacaggtgatacaattggagaatttattcctgattggaaactactgctatcaagtactagagaattactttcgttaatataagctgacattcttgttctgagaagaaactacatgcacgtatctgatacaacttgtcagtattgataatattaatatcattaaacataatagaagatgcccttttctgaaaaatgcctatataggcaagttaagcgaaaatggaaatttttagtatttaaatttttttttatatttttctctctaaaaatgattttgttaatgaaatttttttatttcaccaagagattaatagttttttgggatttcaccatatttataacgtcaaatcaattaataaactgtacatagtgaaacactcatgagtgaaatcgttgatagtcaaaataccatcaaaaatggtggtaacaaactctctgctactgcaagaaaaagacaaagacaactaaagaaaatggataatgaatatgaagaagcattagaggaagctcaaagagctgaaattttattaacagaagagcaaggttttattgaaactgatggaatggaaaaatcttggagatttagtcaagatgaaattgttaaaaatgttgatatatcaactgcaaataaaagatttgaacttaaattaaatgattatggaccttatacaattgattatagtcgtacaggtcgagatttattaatatgtggtaaaaagggtcatgttgcatcatttgattggcgtttaggtactttacatactgaattgcatttaaatgaaactgcaaatgctgcaaaatatttacaaaatagtcaaatgtttgcagttgcacaaaaaaaatatgtttatatctatgatcatgaaggtacagaaattcataaattgaaacaacatttagatccaacacttttagattttttaccttatcattatcttttggtctctgctggtaaatcagggtggttaagatatcatgatatttcaactggtgaaatggttggtgctctaagaactaaattaggtccaacagtttcaatggcacaaaatccttggaatgctgttatgcatgcaggtcattcaaatggtcaagtaactttatggtctccaggtatgagtactcctttggctaaaatgcaagtttgtcgtggtcctgtacgttcaattgctgtcaatagagatggtagatatatggctgctttaggtgctgataaaactcttaaaatatgggatattcgtaagtttgaagaattagatagttattcaactccaacacaggggaattctgttcatatatcagattctggtttagtatctgttggttggggtccacatgttactatatggaaagattgtttcaaatctcaccaaaaacatccatatttaacacatttaattccaggttcacaagttcaaacaacaaaatttgtaccatttgaagatatacttggtgttggtcataataatggattttcttcattaattgttccaggtgccggtgagtcaaactttgatgcattagaaataaatccatatgaaactaagaagatgagaagagaaactgaagttagaatgttaatgaataaattgaaaccagatatgattacattggatccgaatgttattggtactgttgatcgtagaaagccacatgaaagactaacagcgaaggaacaaagtgaaaaggaagcggctgcattagaggatgaagaaaataagtcaagagatgatgttgaaaaattcataaagcctgaaactagctcaaagaattcagctcttcgtaaattcaagagaaagcatagaaagaatttaattactgaacgttcaatgcgtgttcaaaaggcattagaaagagaaaaagaattaagacaacaaaagaaagatcttgaaaataatatacaacgtaagaaagatgaacttgaaaatgctttcgacagatttaaataatagtttcttaagctctaattttatgtacttttaatatacgtttactttgaataatctataaatatattgtaatcatagacaatttgaatacttcatattatatacatttgatacacaattggtaattatatatcctcaatattatcaattgttgtatcgatcttgaaaggacgaggtaatggtgcattcgttacattttgagacatgtatgacttaattgtttcaaatggttcacctggttcagtatcctttaaaacaactacactaccaatagacttgaattttctgattggaacaaatctggaacttttggaaaatgtaatatagttcatttgaactggtactattcttgtcatattttcaacttggtatggttctttggtgtatagagatttaaattgattagtatctaactgtgcttcactatctgctgtgttttcctggttttcttcctttttatcttcagcttcctttgtcttttcagatgcttctttgtcagatgatgttactttctttgcagctctggttcttgctctatgtgtagtagataaaacggcagttgcaactttttcagcttgtttttcaacttgaacttcagtctttggaggataatcaaaaatatcttcctttgtatgacaattaatactcatttttggaactttcaaattttcagtgacaccaataactgaagttggagtgaatgaaagacataagaaattagccaatggatgccagtaccagtattgtgtaaatatagtcaaaccaacaattgccttcatatttaatgtactagtttgtgggttttctaattgaatagttgcatttctaccacttgcatctaatataccttgagctaaagttgcaccaaatctagccaatgattcttcgtgtttatttcctatagttgatgctaatttttctctgaattctttaatctttgggaaagttttctcattttgttggattaaaatcattgattttgctaaaagtgcaccttgtctaacaaaatcaacagaatcgactaataaaggatctaaaacatccaaagcactctttaaaccacgacctgaacatgaaatacctaatgccatagcagaaccataacgaacatatggattatgagattgtgaaagtaattcaacaacagtagggactttagtatattcacgaagtaaaacaaaacctaaacacataacagcaactcttctaacattatcagaagaatctgaaactgcaacatgtaataatttcttaattgcaagtttattagaggtaccacaatatgctaaaccaattgtataacaagcaccgtaacgtaaaattgagtctttactatttaacattttatcgatatattcatcagctttattttctttgccaaaacaaattaaagccataccaacagccaaacttctaataatagtttcatgttgagtttcttgtgcataaacaaacatatcattcaaagcactctcatcacaagtacctaacataactaaacccatagctaaagcagcagcttgaccagaaatcgcagaatctgcataaagtataacatttaattcatcatatacatctttatcaccaagtcccatagctgtagcaccaatacctaaacatgcaccatgaaggataatatcatgatctttgttttcaacacttgatgaattttcttcaacgatatcacgtaaatattttaaaatttcagtatgttgaccagcatagactaaacctaaaccatataatgacccaccattggtgtgagcatttgatgtattacctggtaaatatggttctaaaactttacgaccttgagataaattacctttatgaattacaccaaaagcagaagttgcagaaaatttagaccaatggttagctttccccagccattcaatattatctctgaaaaatgaatcgtcagttgtacctgaatgcatgaatgcattagcaaatgtaactgcagaatgatatagtgaatttctaccatctaatgcctttttagtagtatttaaaatggtaatatctatgttacgattcttagaaaggaaggtcaaatctaaatcacatgatggaataccagaaagaattttcaataatttggcaactgcagatgatgattgatcaataccttcatctgatttaagatactttgaagcaagggtaattaattcttgagaagcggtggagactaaatcaaatgcaacttggtatgccattgaagcgttatcatttgagattaattgtttaaagactttatgagcatactttgcatcattcaattggataataattttagtaattaaaaaataatctggattttcagtactgaataaaattgagatcaatgagtgtaaagctgaatttttaaagttaacatcattaattacagtagttgaacatgtcaaaacatatgaaatataacccattataacatcagatgatacatttgattcgatttgctttttaataatatcgttaacaatatcaagacgataactttctaaggaaatacctaatgcaagtttaatttcattatcgttaacacatttagctaacattgattcaaagatattagttaattgattatcaattttgacagtttcatcagaaaatctggattgtgataatttaatatatgattcaatacattttgagacaattgtttctgcaaaattggaatcttcattggtattgaaggttttaccagctaacaaagaatacttaacagctgattcataatcacccaaattataataaacttttgaagcaactaaagcagctaattctctatgggtaaaatgattatcttcgaataattgttcaatatcggtgattctatttgcaatttcagaccaaaattgatcaacttgtttatcaagggattgtaatgcataagcttttaaagaaggatcttgctcatccagtaaggataaatatggtgcagcagaggtaatcacagacatttctctatgttaactaagacactctatgattagaaaaaagagagattcttaaagtcaaaagatcattaacaccaatttgccaccgaaatatttcttgatgtaataatattgagagactgagacaccaccaaattttaaacagcttaggtaatactttacgaatttacagagagatgatgacaattaatataaattttatgcactttattaggggtatgaaacattatgttgaaagtgtttcatccatgatatatataggagtaaataaatataaagatgaaaataatatagtatagtataatatagtataaggcaaaaaagcaggaaaagtaattatcgaaaaaatgtaaaaaattcaataaaattcaccatctgaaatgagaaatagttgaatacagctgtaagttagggaaaccaaaataaatctgaaagataacaagaattgaaagttgaatgggaaaaaatgtatcgttgaaatgtcttttttttcaaaattgaagatctaatataataatctagttgaaatattgtaacttgtagcttcaagttcagtgtataagtttttaatatcatcactattaacacctgagacatcggccattaaataagcaatatcacctcttgaatcagagaattgtttttcaatattataatcagataaaatttgattaacagttttcaaaacacctggaacattatgatgaatgtataagattctacaaacattttgttcatctaaatctaatggtcttaatgaaacttctgggaaattaactgcaccaactgaagcaccttcatttaagtattttgataagacagtaccaacttcaataccaatagcagattgagcttcttcagttgaaccaccaatatgaggagttaagataacattttttaaagatttaagttcatcaataaaaggtaataattcatcaccattgaaatgaggaccattagctcttggttcctttggataaacatcgatacaagcaccagctaatttaccgattttaagagcatcaattaaagcaggtaaatcaacaacggtacctcttgaattgttaattaaataagcaccatctttcatttcagctaattgaggagttgaaatcatttgttttgtatctggagtttcaggaacgtgaagggaaatgaaatctgaattatttaataattcagctaatgaaccaacttgtttagaattacctaatgacataatcattgtaacatcataatataaaacattcatacctaaagattcagctagaacggataattgagaaccaatatgaccataaccaacaatacctaaagttttacctctaacttcccaacatcttgcagattttttattccagaaaccattatgtaattccatatttctatcacctaattctcttgataatgcgataatttcagcaattgttaattctgcaacagatcttgaatttgagaatggggaattaaagactgcaataccacttttagcagcaaattctaaatcgacttgattagtaccaatacagaaacaaccaatagcgactaaatgttttgcatgtttaaggacattttcagttaatctagtttttgatctaataccaattgcgtgaacatctttaattttttcaattaattcttcttcaggtaatgaagttttcaagaattcaacttgataaccttgttgaccgaaaatatctaaagcagtttgattaacattttctaaaagtaagattttaacatcaccagttgaaaaaggttttaaagttttacttgcctttgatgaaggtttatattgatccatataggaagtagttggagaagttgaaactgtatttcttggagatgaagataaaccagttttttcaaaagcttgagttaaatttgagattggttgaggtgctgacattttatattgttctaattgattttgtgtcttggtttaaagtgaagataagagataatggcaattaagttaataaaaaggattaagacgggaattacaagagtttatataatagaaaacaataaggaaacgaacaagtcaaattaattatgatgaattaattaattgatttttcatgaaattaatttaataaatttcaatttcatgatgacacactgtggaaaaactaaataatcagtcattcaacgttctaataactattaatggaatgtgaaaattacttagtgtgagagtcggcgaatgttgaggtcacgtgtaaacgcgtaataatattactaaaatttctaataaaagtttatacgccgaagtgctaatactttaacaagataataagttgattaatcaaagccccaaagataattgaactcaataaagataataagaaataaagatggggtgccttaagatgactaactttactataataaatctaatgaagtaaaatagatgattgaaattttgacttcacaaatttaaggtaactactacattgtcagagagtcaattttttgaacctatatggcagaagtcaattttatttgatgtaaaacggctttttataataagttgacttctccctctggtacattcggaatatcttactaatgtttccattcattattacgtaagatattgcacgtgacacagattaggtctttttattaatacaaaaccctctttttccagaaagactctctttttctcggttttctaatttctcaatttttttagcgaggaacaataacctttcaatatttcccatgattttttcacttgatgaaaaattatcataatctatctaatttttctttaaattttactttaaattttacctctttccccagagttctctacgtcgattgaaaaccaacaaccccggatttccacgttctatattccgacgaattctaattaaataaatcaaataaaaatgtcaggtgcagctccacaaaacaacagaggtccaagaagaggtccaagaagaaacaacagacaaggtgatgaagaaaaagcttgggttccagttactaaattaggtagacttgtagcatcaggtaaaattacttcaatggaacaaatctatgctcactctttaccagttaaggaatatcaaattgttgataaattattaccaaacttacaagaaaaaattatggctgttatttccgtccaaaaacaaaccagagctggtcaaagaactagaatgaaggttgttatggttattggtgatggtaatggtcacgttggtttaggtgttaaggcagcaaaggaattagctaatgcaattagaggtgctattatcattgctaaattatcaattattccagttagaagaggttattggggttctaatttaggtgctccacataccattgcaaacaaaacttcaggtaagtgtggttcagttaatgttagattaattccagctccaagaggttccggtattgttgcttcaccaactgttaaacaaatgatgcaatttgcaggtattgaagatatttacactacttcttcaggttctaccagaactgctgaaaacaccttaaaggctgctttcgctgctattggtaacacttacggtttcttaactccaaacttatggaaagaacacgcaattcaaccatctccattagacttatacgttgaagcaaagaaataaatttaattaattttttagtttaatttattaatatgcttttatgtctaaatctatttatcattgtctattattttttataaatctttatttaattaaaattcattggtaatttatacacttatcttccgtaatctctagattttataatgtattctattttcattgttgtattagttctattaatgtattatacacaataatttatacaaaatgtcaaaaaaaaatccaaaaaaaatccaaaaaaaaaagaaaaagaaaaaaaaatgatacacaactagaataataaagagtaaaatcagataagataaaataaagtaaaatagagtaaaataaagtgaaatataagtgaaaattcaattggttttagttattaaaatacatgaaactgaaatgtaaaaataagaaagtagtttttaataatcaatcttaatcaagccatttcttgtggtggagcctgttctaaaatttgatcttcatcaactgcaaattgacgttgtgatgtattaccagaatcttgtaattgaccattaatccaaactttattaccacctggggttgcaccgtttgtaaattgtttaccgtcaggatgttgaaatgcacaatttgcattagtacaattaacaccaaatctacaaacttcattaagtggatgttgaaagaaacaatcaattcttgtacaattagcaccctctctgcacataacttgacttttagcatgtctctttggacatttataattcttacagtatgaaccaaatttacattgttctaaagttttctcaacttgattgtttggtgtaaatgatgatgatgaacttcctgttggaacaggttttggagctggttgataatttggtgatgaatgagctcttgaacaattaacatctttacattgtttattatcaacacaccattgtaataatgtaactttagcttccttatttgctggtgttggatggccaaatggacataattctttttgacaaactgaaccaaatttacataatgaaatacctgtattctttggagcatttgccatatttctctttgcatctctgattctttcatattctttaaatagttcatcatcttcaccaggatgtaaaaatgtacatgtttgattttgatttggacaatttgggaatgccctacacattctagttggatgagcatttgggcatattttatttgcacaatgtgggaaatctttacatctttcagttggtctatttggagatcctgtgaaattagttgtcatttcgttattattatttaatgacatttcaatcatttttgacatattattttgtcttctattattcattgttctactattattacccctagtatttttaaaattcataacatttcttcctgttttattaaagttaaatttactcatattggtattagaatcatgacttctattactagagaaatcacttggattaaaggcagattgaacattttcactgaaccttacttctttatttgaatcatcatttgaaatgttattatttattgatgaatttaatacatcactaaatgctgattgtactggttgaacaggttgttgttgttgttgttgttgttctgttatttgctgtgattgttgaggttgtgcttgttgttgttgctgttgttcttgcccttgttgtggaaatgcagattgtggtacaggttgtacatcacctgaaccttgattttttagtatttcatttataacattttgaacaaaattttcatcaataattgaaccaaataaagtattaaattctgcaacaatttcaggacgacttctattatttttaattaaaactaataaataatctgcaacatatgcaggatcatcaacacctgttaattggtttgcaatttctgttttaaggtttacaccaaattgactctctggatcgaaatcttgaacactcatctttgtcaaaataaaaaagaaagaataaacattagtaatgaatgatttgaaaggcaaaaattcattttttaaacttcatgtttttataagcttgaatttacactatggaatatcgatgaaattttttttatatttttttttgagtgttacgtaattggattttcttattatcgtcttatcgtcggagtttgagttatctttattatcgtacttctgtgcatgagagcaagaactagtagtggtcaattcttatccacatgtgtcatagattacatccttttatcaataattatatatttggtaactacaaacataaataatcctatgccaccccaaaaaaagtcgtttcttttataaaaattcttagccataccaaaacttttgaaacacaagtttttgataaacgataatgataagttagaattaactgagtttacttttttcagtttaacaatcatacttaaattattatcattagattgtttcatagcaatattaatatcttctattgattcaatagtaataaaatcattatcattatcccagtaacctaaatggacaattatatcttcagtgatgggtatcttcttactgatgaaagacataattgaatcatacattacattttcatcatattctagttctgttaaatagatcttatcattaaatcccaaattaacaccaatcaattcattaattttcaattttattgttattaatcttctattttctaaattagtattgttgatattcaagtttgattctaattcaggttttgaattttcaattggatcattaaaataatatgatttgacatttttaccaaatgaataaaaatctgaatctgaatcatcaccattttgtaaatttacataagaattatttagatcattaaagttagtactttcgggtaaattagtataagaaaatgatcttttggaatttaatgaagtatttaattttattttatttgatggtttatcagcaactgagaatgatcttttagaaaaatttattgacccattacttgaattattaactgaatatagatgagaatttgatagaggattatttaatgggcgatccaatgaatcccaaaatttattccatgcgggtacattattattatgatgattgctattgctatttttattgttgcttttaatactatcagcagtttctaaattattcttattatcagaatgtaaggaagactgatttaaaattttaatcaaagcataagttaaatctaaaacgttaattaaagcaataatattattatttgaatctttaattggtaagtttaaatatttaccttcatacattaatcttaaagcatgattaattgacattgattctattgctatttcaggttttggagtcattattcttacaactgaagaagaatttaaatctatttgacatgcaagtacacgataaactaaatcttttgttgttaaaatcccgagtatatcattagcatttagaatagtttcattaatagagtgatcattattgtcttctttattaccagtattattgtgaacaaacaatgcagatgttacattatttgataaaagtaattgagaagattcataaattgatgtatttgaaggtatcagtaaaggtttttttgattttaaattaaaatcattatcatttaataaagattttagatctggttgtttcattattgaaattaatttttttaaatcatttacaattttgttttttttgttgtttatatttaaatctaataaatcttcattaagtgaaatcaaatctaattttttattatttttcaattgatttgtatgatctctaattttgattgaaggtaagatattctctttaaagtctttttgattatcaatattattattgttgttaaaattactattattattattattattattattaaaattatttaaattattaaaagttgattgtaaatttttagctctttcatttaatttttctaatctaatcattgcattatagaaacaagttgttatatttaagataccaataactaattcattttcatcaacaattggcatatgtctaattttattatcaaccattaattttaaagcatcattaggtgaagttaaatgagatacgaaataaggatttttagtcattataattgaaattgaagtatttaaagtatttaaatttttggcaattgccttaaatgctaaatctttagttgttgtcaatccaattaatttaccagataattcatcaataattaaaagacaatgagttccttttcttttcattaatagagaagcatttaaaatagatgtatcaggtgtacaatgaactggtaaatctgatattctgaaaagtgaatttttagacagataagaagaatttgttaaaggtgaaattgatctgttgttagtattagggttattatctacattattactcatacttgtgagtagttgtatataaagagataggaattaaagtgataagataaagataaacatcaaaaagagatgagccctcatgaaggcttatggatcaaatcaaatcaaatcatctcactattatattattaaatatcctaaaagggtaattaatgaaaggggcaatgcttagccaatacaataacaatattaagtacaattacagttaaggcgcgaatcattttctaattaaacccgaaaagggtaataatcccacatagtctataaattagagcaatgaaaatttttcagtttcaacattgagaacaataggggaacttaaataagaaaaaaaatgagagagtccagacttataataggtaatctaattaattctcccttttctgacgtctccgaaacattatactctaattactctattaacaccccttttaataaatcttataaaaggagagcatctcccaccctttttttcatggcaaaccgttattttcaccttttttatttacctttcgtcttttgatccttttaaacgtttctcgtcgtttccgattctgccatttccttcattttcccctttacgttttacttctcctttcacttccccttttttaaaattattatttgatcttttttactcttctgtccttttaattatttcctctttatttcctctctatttctttccttctttcatcagacaaataactctcccctcacattccttttagtaatccaactattttacattctttcgaataaactaaactaaactaaactaaaaacctaattgaattatagtctttctttaaaaaaatacaaattattgataccaaaattaaaattaaattaaaattaaaatcaaatctaaaaatactaaaaataaattataaaaaatgaaatttaatcaagctttatcaatcttaactttatcaactttagtctctgctgctccagttgtcttaaatcatcaacatcatatgcataaaagagaagctgcagttgttactaaaactgaagttcatacagttatcgttaatggtgcaaatccaactcaaccagttcttgatgtcgttacaaccgcagatttagttaataatgatgaattaggtgcaactgctactacttctgctgctgctgaaactactgctgctgctgctaccaccgctgctgctaccaccgctgctgaaactactgctgatgaaactacttctgctaccaccgctgctgaaactaccgctgctaattctccagttgaaaaatcttcttccttaaaatcaggttcaggttctttccaagatggtacaattccatgttcagaattcccttcagttgatggtattgttgcagttgattgggtcggtttaggtggttgggcatcagttatggcattagatggttcaacttcaaattcttgtaccgatggtttctattgttcctatgcttgtaaagctggtatgtcaaaaactcaatggccttcaaatcaaccaagtgatggtagatcagttggtggtttattatgtaaaggtggtttcctttatagatcaaatcaaaattctgattctttatgtgaaaatgatttagcaactggtttcgttaaatcagaattaagtgatgttgtttctctatgtagaactgattatccaggttctgaaaatatggttgttccaattgaattaaatggtggttcaactcaacctttatcagttgttgatgaagatacttattatatgtggcaaggtaagaaaacttctgctcaatattatgttaataatgcaggtgttagtgttgaagatggttgtatttggggtacagcagctgcaggtgttggtaattatgctccaattgttattggttcaggttcaactaatggtttaacttatttatcattaattccaaatccaaataataaaaatgctgctaattataatattagaattgaagcaactgaaggttcatcaattaatggtgaatgtacatatattaatggtcaattatcatcacctgatggttgtactgttactgttacttcaggttctgctaatattgtcttctattagttaaattgattgtttattgatagatttgatcaatattattattttgtcttttgctaatagttgtttattttctttaactttcttgcacgttcgttttcctatttcatttaaaataaagtaaaaaaaaaatagaataaataaaaaatatatcttagaattaaaatattaaaaaaaatacttgctaatcaatgataccatttataagtcaatctactatttagaagttagaatatttaatataatagcttacgtaatatcacaaagcgacaactccgtaaaaattaattatttaataaaggacatgtcatgtcatgagattacttatcttttattgtttactgcttagccccacaattttgctcaatttgctgccactgtttctttctcctttttcctttttctacgagtatatactgtataaccaatgcatccgcataatacacatactcatacgaacgatatatccaatggatatcctcaattacgtgaatctccaacatttaaaacagttgattcaatttatgaaaatagattacgtcaatttattgatgaaggtcaatatcgtgaattaaatttaccaaaattttacaatagagaacgtttaacattagctaattcaagtaaaccaagtaaaagtgatgaagcaggtatttgggttgataaatggtcagcacctggattatcaaaacctttatataatgaagttattccttctaaacttgatgaatttgaaacatttaaccctaagaagacaatttcaatgtcacctaaatggagttctcattggttgaaaatccatattagaattttaaaatcttggtatgatgatgttgataaggggaaatctaaagaaaaaggtgaagttttaacctttttatttgatgcaggttgtgaagcaatgattttcgatcaaaatggttgtccattacaaggtttaacaggtgaaggtgaaagaattgaatgtattttaccattagattttttcaaaatttcaaaaaaatttcctgatacttatatggaatcaacatttttcatcgaatgtggttgtaattcaatgtttggaggtggtggtgatgtttataatttacgtgtttgtgaattagttcaatttaatcatcaagctaaagctttattttatgatttttgggttttaagtgatgttgctagagaaaattctggtcctcaaaaacataaagcaagagaaatttgtaatcgtataatggattcatttgattcaaataatgaaaattcaattgataaatgtagaaaaattgctagtgaatttttaggtaataatgttgattcagaaaaagtttacactgaaaaaaaattaaataaatttaatgcagcttatgcaattggtaattgtcatattgatactgcttggctttgggattttaaaacttctaaaactaaaattgcaagaagttggtcttcacaattaagattaattgaaaaatatcctgaatatgtttttgttgcttcagcggctcaacattttaaatggttaattgattattatccagatttatatgaaaaagttaaaaaggcagcagatgatggtagatttataccattaggtggttcatgggttgaaaatgatactaatttaccaagtggtgaaggtttagtaagacaatttttacttggtcaaagatatttccaaaatttatttggtaaaaaatcagatattttttggttgcctgattcatttggttattcgtcacaaattccacaaatttgtagattatgtgaaatacctaaatttttaacacaaaagttaagttggaataatattaatgttttcccagaaaattcatttaattgggttggaattgattgttcacaagttttagttcatatgcctccaaataatacttatacagcagctgctaattttggtgatgttaaaagaactgttttaaatcatcataatttatatgatgatcaaaagggtatgctattgtatggtaaaggtgatggtgggggtggtccaacacctgaaatgattgaaaaattaagaagatgtcgtggatttgctgatactgcaggtggtgaattcccacagattgaaatgggttgtacagttgataattttttcaatgatttatataatgatactaatggtggaactaaattaccttcatggagaggtgaattatatttagaatatcatagaggtacttatacaactcaagcaaaagttaagagctatatgagaactgttgaattattaatgcataatgttgaattatttgcaacttttgcatcaattttagagaaagataattataaatatccattagctaaaattgaaaaattatgggaagatatttgtttgtgtcaatttcatgatgttttaccaggttcatgtattaataaagtttatggtgaagaagtttggccaatgttatcaaaagttatttccaaggaggaaaaattattgaaagatgcattaattcaatttgatatctcatcaactaaggatgaaaaatataaacatttaattaaattgagctcgttaccttgggaaaaaacttcagttgaaattgttgaaaatttaccaaattcacttttaaatatttcacagaaggtatctaatgttggcaatgataataaatactttgttaaatttcaaggttcaacattgatgaaacctgttttaagtaaagttaaatatccttcaagtattaataaattagatgatggaacattttgtttggaaaattctaaattgagagtacttattgattcaaatggtttaattttaagtttatatgatctaatcaataaaagagaatatattaaaccaaatcatattaagggtggtaatcaatttacaatgttttcagatacaccattaaatttctctgcatgggatactgaactttattcattaaataaatttgaatttattgaaaaatcaactaaatgtgaaattaaatataatggaccattagttagtgcattagagattgaacataaattatctgataatagtaaaattatttcagttatttcattaaatggattaaatgaattaagtgataaatcatcagttaaatttaaatgtaaagttaaatggaatgaaacttataaattcttaaaagttcaattccctgttaatatttcaaatgattttgcaagttatgaaactcaatttggtataactaaaagaccaacacatttcaatacaacttgggatgttgcaaaatttgaatgttgtatgcataaatttgttgattattctgattttaattatggtatttcaattattaataataataaatatggtggatcagttcaaggtaatacaatgacattatcacttttaagagctccaaaatatcctgatgaaaaggcagatattggagatcatacctttgaatatgaaattttaccacataatggaccattaagtgttgaaacaattcattcaggttgggaattcaatgaacgtatcccaaatgcgttatatatttcaagtgaaaagagaaaattattagaaaatttaaatagtttagttaatatttcaggtgatgaaaatattattttatcaaatattaaacgtggtgaagatgactttgatgttgattataaaaatggattgatggataaattgccaaagaaatttgaaggttatcaaacagttgttttgagagtttatgaatcactaggtggtatcagtaattcaacaattaagattggattaccaattaaaaaagttttcaaaaccaatttattagaggaagaaaaggaagaaattgaaattaatgaaccgaacgaatttagtttccaattaagatcatttgaaattgcaactttcaaagtcgtacttgataataaataagtatagatttaaaaaaaatagggattattgtgtattaaaaaaaataaattatttgtaagtaaaaaataaacgaccagagtgaggattgaactcacgatcttgcgattaacagtcgcacgccttaaccaacttggccatccagtccttattgacgttaaaaatttgcagttttatcgggcgctagtgccaaatagtcacgtgacttgattttttaaaaaacatgttataaataatgttgtatgtaagtcaaacaagtagttttaaatgttatatttgtataatatacaccaaactatagttgactaaagtaaaaacaaaagaaagcaaaaaaaatatataacgtaattcacctaatttatgccaatttcttgtattttgacttgactactgtaaaataaaaaacacagttaaacattaatttgaaaagttaaaaatacaaaaaaatttcatcatataaaatataaaaagaaagatataagcaagaaaaatgaagtagcaccataattaatcataattctaaagtactcatatttctttttttacatcttttagtacaaacccaagttgaagcatacatattaactctatcaattgattcagttggagttctgataccatgaggttcacaagtgaatccaattttttcaaaattagcaatataccaaggttttgaagcagctgatcttaacataactctaccatttggagctaaagcttgataaagagcagaaatttcagcatcagcatcaataccatctttagagaaccagtccatatgatccataatgatagcaattgtaattgaaccagtagttaaacgagcaaagacatcattaagaaagtcagtatgaattctaatattatctaatggattattttcctttctagtgaaagatttgtatgcattattactcaagtaatcaggacaattatttttagcataatgaccttgtaaacataaataatagaaataattatcagttgaaactaaagatctattaaccattggttcaaaagtatctttcacatattttaaaactgagggacccattaaacttgcttgatttgccggaacacctaaagctttccaaagaaataaaggattaccaactaatagtttagagacgattggatttaataaagttggtttaattttagaattccagattttcaattgttcatccattgtttcagcattacataaattatcaatatcctttttaataccagttaaagagaaaagataacttgccattctaatcgcccatttggagaaacctgtatcatagagacctttaccatttggatcaaaagtttttgcaccattttcataccaatattggaaagcatttgaggacatatgaggagataatttgttaattaataaatcagtaaaattattaattttacccataccaaacatttgccaaatttcatcctttgataaagatttaaaagaagctaattttaattccatcaaatgaccttgagaaggatttaaatcaacacaatgaattcttcttggaggattttttaaagctgcataacttaaaacattatcaccagcagatgtgattgctaaaacaacatcatccttagtaaaatttaaaatattatgatcttctcttggatcttcccaagtgaaggcataaatatattgattattaaattgattatattctggtcttaattcatcataataaactctataaatatcttcttgatagtataatgaaggataaggtaaatttctaatttgattattaatagcagcttcatgacctttacttgtttttaaatcattgttattattattagtatcaattaaatcttgaggagctaaatagggggattcagttgctaatgcattaactctatgtaaaagagcaggtgatctatctttatcacaacctaaccaaatataataaggtatattacctaaagctttatttgataaattcaaagattttaaagtaccaaatctatattctaaataatctcttcttgcaggatcaagaaagactctatcagcctcaaaccaagttctccaaaaagttctaaaaacccaaggaatatgtctattttttaaaccaccaacagtattaactctaccaatagttgtttgatcggattgaacaccaaaatcaacacaacaaatcaaaccatctttatgtaaataattattcaaatgatcaatagttgaatggaaagttggaatcattgataaagaataagataaagtaattaaatcaattgagtcataaggaatttggaaagtacaagcatcttcaagtatacaatgaacatttttaatatttaatttaccaaatctttctttggcaatgtttaataaggaaggagataaatcaataatataaattgctttaaaatgagttgataaatctaagattgtattcatatattcaacattccaacctgtaccaccacctacatcaacccaaactaaatctttttttttagataaatgagagactgctagttcaagagattgttctctaccctttaaaaggaaagttctggttgaatcataaatattagcttgattttcataaaaagattctaatgcagactgttggccatttgaattttttgatttttcctttgatttaccagtaaatggggcaataaaacaatgataagcaaataataataaagttttagcagatgaattataaattgatatggctaaaagaaaaacaataagagttgataagattgaaagtgaatactttggataataaatattatcagttgcggatacaaatgaatcttttaaagatgaagtatttaagaattccattgcttacagaaggtagaaaaggaaatagaagtaaaagtaaaagtaaaagtaaaataaattagaaacattgaatagtaattgttttgaaaaggggatacaggagagtatttatagagttaatatttaaaataatttttagaatgtgaaaatcaatagttggcaaatactagatagtaaataacagttagcaataaaaacacaaagcaaacacgttaaagcaaataacaaatttcaaaagcatgtgaagatgaagataaccttaagtactttaccttatcttacactatagctttcactttcagtaaagtaaatacacgtggggctcagtataattttttttattgaaattttcatgtcaataataatagttgagccaccacactgtcattacgtaatctttaacattaaagtttctggaataataaagataaataaagataattaaagataaataaggatagtcagacaatataaaattgtccattcaacaatgagataaataaaatctttgacgatgattctaatgggatcttgatcaaactaccataagtattaaagtttccttcttctgaataagttattataatcaggttgacaatctaatatcatcttaccatgttccattaatccacatactggaataatatcaagtctatcatctaataacatatacccacttccttgacttatatcactcaattcaaaattaatacatttttccatctcttcactgacacatggaacccaattttccttaactttcattttattatatttaattataagtaaattatctcctgtaaagccatctataccttcatatcttccatcaatatttgccatatcatattcatcatcatattcatcatcagaatcaattaaattctcatttccatttttacttttacgcaaagtagacttattacatttaaacatcaatatcttctctacattaatatatttccattctaattctcctggtttcctatatctagcaaatcgtttacatgaatcaattactaactcatttgagttaatcataatattatcatgttcataaaccttaactaattcacgattttttttaacattaaatatactggcagctgcattaattagtttatcatatttatgcatatttgctttcctaactttttctcccattgaaaatttataatttgatagaagtgcattattcttagcaccctttttgttatcctcaaaacttttattgatttctcttaaattagaatataattttactggtactcttaagttaagtatattcatcatcaaatcactagaatccgtcaactctttaacatctttacatattttctctaatttaaaatctaatgtatctttaaatgatccaatatcatcccatttgtcaaacatgtgaataatataatgatttgaaacgcttgttaatttccttaggaattcatatttttcacttaattcatcaataacactcatcaatttgatataatttttctttaataatggtatatcatcccttggaactccactactcatgaaaacagctaaatgttgactaagttcaactaataattcaagtattttggattgcatactatcctttctacccaaattatccttaacaagtaatgggaataaatgtaataatgttttaatatcatccattttaattggataaaaataacttttggattcaaataatctcaaaatatcgtcataatctttgaaagattgttcttcaattaagtattcaataattgatgtaatattatcatttaaagatacaaacgattcttcatcaaattcttcaaattttggatcataccatggtcctctaattattctttgaataaatatatcacttagtgcaatatatttcaaatttggggtaataacgttcataaaatcaaaattatcgattcttctaaatgcaaaatcagcttttaacccccaatcaacaccattattaatgaatttaccactctcagctaattcacacaattctttcgatgtattcagtgaatattcctttccatccttaaatgaaattggattcccaattgccttggtattcactctcttaatcttacaacaaatacatggaaatggttctctgacacttggaagttctaatacatttgacaacatcatattatcacccgtaaatatgacaagattagcgaacaatgtgtattcaacaccatccacagtaactttgaaaccttcgttccataaatcactcaaatcagccattaacattttaagaatctcttttagtttcccaggtttatctaactttttttcaaaatatgttggtataaattgatatttatcagaatcacggagtttgggtggtagatctaaaacattcattgcaacaacatttaatttgacctcttcatgttcactaataccatcaattgtcatacctaaattaaaacagaacgtatttggttgtttttccttttccttggatctggcaaatccattaccactaataacactatcactgtcaccggcatactttgctctagtttcatacatgattttccttgttttcttgttgatgaacaaatgcgcaagaagtgaacgaatactttcgtatctcatcttaactcttttcctttcttcaactttacaatcaggattagtacaatcagtttgattctttctatcaagaacataagatgtaaaaccacatgaacatgcatcataatcgatacctgtacctaatttatcccattcatttttagaccattcaaatatttgttcaacatcaaacttctgaccaatagctttgctgatatctttaaaatccttaaaacgaaattttcctgaagtcaataatagtccaaaatcatattttatttttttatcagatgcacattgaaatagtttttctaaatttttttgacctaatgcaattaaattatttactttttccttaatattaggataagaaagattttcaacaatttgaatcttttctccttgtgcttcctcttcctctttctcatcatctacatccattttatcaccctcatctaccatacatccaataatttcgatttcttcctcaattatatcataatcatacttctccttgagttctttcctattggtctctgcttcacttatttcataatgtgcatagttatcattagaaagatcattctttctttcattaatatcatcataataaagtttaaaagtggacaaatagcgtgaaatacctccaagttcattttcagtaaatgagtcgagcaatacattattcttaaataactggaaacatgtatcaatcattgataatagaggcctaatcccatcaattctcttcgcattaacgccatccaataaatctttctcatcgcttgtaaaacagatgtcatcaataacgtttttgatcattgaatcaaattcttcattttgtccttttaatggttgtaaaatttctgataaaatagtaacaaaaattggtttaatcctatcgaggttattatcatcttcaattgaggttataccaatctttctgcattgttgatagaattgtacattcaccaaggattgcgtcttaggtgtaatcaatccctccattccgataatgaaaagaaaacttgttgctaccaaaaagctgaaaattagctgagcatgaagcattgaaagttagcgaataggaattttcttttcagagagtatattaagttatcaacttctacaattagtgatcgataataaattaactgaaactattaatgaattaaatacccttacagatgcatcagcaaaggacggtagattcttaaatagcttgaatatctccaagtccatctttattaaatgtacctaataacatattattcgtaaataatttgtaacatttagtaactatttttaaaagaggttcgatactactaattttacagatatcttcaatatcagatgttgcaatcatcatagcccctaaatctattcttcttatcatttcataatcaaaataaaaatggtaatcaatgatgattttaagcattgaatcaatttcttcatcttctgatttcaatggttacaaaaattggtttaattttatcaaggttatcatcaatttcatcagtagttataccagccttcttagatagtttataaaattgcacagtcataaaagattgtgtcttagcaccaaacgatccatctatgtcgattactgaaaagaaagctttgtatagcaaattgtgaaaaattcaaataattgcgacatggaatattaatatttatgataattaattttgaactttataacttatttatatacacttcgtttttatagacaaagtgaagtataatgtctttattgacacagtatctcaaactatcaccctccagggtacgtcctcttttaaaaaaaactttactacctcatagaatacccaatttttccacaaatactacattatattccaagcttaaatttaattcagatttaaattcaaatttagtttcacattcttcaattttatctaaaatccacgctagaaactttcatacatcacctattagaaatgcagagttttggaaagtgggtacaaatataaaaatctttagaactatgttaaaggaaagtggttcaagtcagtggaaatatagagttgtcttattcttagttattttcacaattttaaattttgttttcaatgttatgcttacaattttaactaacatttatcttgaaactttacaaccttcatgttggaaatttggatttaccgtcaatactgattttaaaactgggttagttgatgaatatataaaattagaggaatcaaatgcaaataaaaattattttaaatgtttaaaattgttagctaaagataatggtattttgtataatactgatatcgatgatgaaaatataaatatttctgatattttgttacgaacagatgaattagattcttggttttttaaaatgaaaaatgaaaattatgtatcagtttactgtgatttattattaagatatgcattaacatgtgaagaatctaactatattaatgttcaaaaaataataaatcatacatttgatttgattaatcattatgaaaaatttacagataaagaaatttcaacttattcattaaagagtaaagcattaagaattcaagccgatttacttaaggcaaatgatgaaaattttgaattagttgaaaagaaatatcttgaatcaattaaattaattatagatcatgaatataaaaatgaacacgataatattgaagatattacactagtaccatcaaatgaaatctcttctaataatttaacaaatgcattactagatatttgttcattttattctgatacaagagatccaaaatatattaaaaaatctttaaagatattattatcagatcttagatcattagagaatgaatttgatcaactagattcacattttaattccaacgatatttatagaaagaataaaaagacattatcaaatgaaaatgagaaaagattaatggaattaagatttgaaaaaattccattattaaatttacaaattagtgaattattatggtttaataaacaatatgataaagcgattgaatttgctaaagaatctgcacaagtgtctagtatgtatgctaatatgaattttaattctgctaaaattgctaaattaggtttcattaatttagctacaatgtttaaacatcaaaatgatattgatggttataatctttgtatacaaagagcagaggagattccaattccattagatgcttttgctagattacctagatctgtccgtgatacagttcttgaatactggtttggttcatggggtaagttcctattccctggttgattgataatcattcatttataaccttgtatataaacaatcaatgtaaagaccctaccctttgtgaaaataaaatatttcaaatatttttttattattcagcataacagttgtttttccgcaatggcacttacacgtttattgaatgcatgtttgttttatttgaacaatctatggataaatcaccaaagatatgacatctgacccatctataacactaccgaacacttcaggtattacatcttttgataatctacttagaatatcagtttcaaagaacttaccaccttctgtgttctgtaaattgtacaaagattttaaaaatatttatcaacaacagtcaaatgaaaaattcaattcttcattattgtttaaagatttagataaaagttctactcaaagagaatatgtttacgaaatattagttagatctgatttatcaaatacatgtgatgaattcacaaattatttttcattcatttattcacaattgtccactcatgaccagaatgttctgctcttattgatcaaacaattgtcagataaattcccatggaaaacttatgctgaaaatgttaatgtacttaatgcattatctaactattgtaaatatttaacatctaattttgacaaatcaaataatgattcaattagtcttatctcatcatttgtgaaacttttaactcaaatattcattcatgcaaaaaagattagattagataatgatttcatagtttcaataacagaattctcagaatggttagatataaataaattcttagataattcagaatcattacaatcacatctctctgactataatatcgcatcaattaaattaggttttaataattccaactcattttcatcaattaatagaattcaatcatcaacaaatcttaaaggtaaggttaaaaaggaaagagaaaattcaaaagtcttaagattaaagaaaagtatttggctttcacaaaaattcacagttgaatttattaaacttgatgataattttataacattatttatggaattagtaaatttatcagatataccaatatcgaattgtatggtaaattttgcaacagaacttttaaatggaatttttgaatcttatcaatcatcagacaataaaagtaaaattatttggacgaattatttaacttataaaattccaatattcttcaaacatgtattgaaaataaataaacagaaattagaaaaaactatagtatcattattaactgatgaatataattattttttgaaacataccgatattttattaacatttgaaaaacatttggttcaattagacttattaaatattggtgcattaaattccatcctcccacatagtataaataatgaaaacaagactaataagttaacaattgatgaattgaatcaaagttttacatataaaattctagaatgtaatccagaatttacatcaattgaagaaataggtataattgatttattaaacgatgttagtaaatctatcattttgaagcaaaaattcagcgatttagttaatgaaacaattgattcattttttataacaggtgaaacattgaaattacgtagattattaatttcatgctcaatcaattttgaaattctagatataatattattatctgaatctccatataatatcttgttattgttatttaaatttcttgaaactcaagtgtctcaaaaacctgaagctaataataataataataataataataataataataataataataataataataataataataataataataataataataacaattatggaaattctaacactgcaacaaccactgccacaaataacaataacagcaacaacaatgaaaacaatcaatcagatttaatgatggatttggatcttggtactgatgattcatcaaatactcaagatcttttgggtgatttatcaacatttttagttttctcacaattcataatatcaagatataatttgctattacaaagtagagaggattattatccgtatgagaataccattgcacttttgaaaaatatgaaaacaattattgataaagaacaaattgataaaaatagttatgataataacagtaaaccatcagagaatcctgcgactcaagttgaagtttccgatgaaactgttaataagtggattttatcattattcgatacaaataatgttgaaggtatatcagatgatttaatcaaattaagtacacctcttgaatattcacaattaattccagttgtaatttatgaagcaattacttgtaatttcattggatggattgatgataatgcgttaacatgtggtttagaatatttacatgagaaattcttagttggatgggtttattatgtaattgattcattatgtcaaattaaatggatgaacaaaggtgaaaaaatggatttaattttagatagtgttttgaaaaagttaataacagttaaacaaaatgaaagtattgatattaaaattctaataaaaatgatcaaagaatcaacttatgaaaaagttaataaatttttcccagatttttataaggataagaatacgattgatgatgatatgagtttacaaattggtaaatcgaacattattccattaaaagatttaccaatgagggaaatggtttccaacttaataacatttatatcaaagacagatagatcaaataataggaatgataataataataataatgataataataacaattacggaaataatggtacaaatcaaaatgatatttatagtcataattatgattttagtttatcgaaattatggtcatatatgcttggtgataaattaggtgttgatacagttttaagtgaattaagtgaattattgaaggagacaaatttaaatgaagaattatgttatgagacaactacatttttactagttacatattgtaaatggataattggagaatcaattcaaactgtttggcctaatgcattatcattcattaatagtagtaattcattatatgaactatcacagaataatttaatatttaacaagagtccagatccaatagttataaagaattacaatgttggatcaccattagaatctactggaagttttattaaaccagacaaggaaactgtttctagtcaacaacaagaatccaatttctttggatttatccaggaatctaaatttgaatcagatgaaatggatgttgatacggataaaaccaatgaacaaaatgaacaaaatgaacaaaatgataatgacattaaaacagaacctaatactggagtaccttctatccaaaatgatttggatgtatatggagataatttaatagtgatagcatacgagaacagaggtgatgcagtcactgagaagttcatcaggaagatacttgaccatttatagttgtaaagtgtacaatattacgtaataatctattttccatttctttattaattgttctgctttccacttatcagtagatttgagtgggagagtcctccttatcgagttatctttaccttctttatcatttggcaataaccgattacacatgtcgaagatacccgtaattgcatttcctgaggaatcttcattgcctaagctgagaagggttcaacatcctgcactcaaatttattaaagtactctccagatcaacattatcaataacgacgattattttactaatattcaaattctttattcaaccaaatttacaaacaattttaaataatagatttgaattacataattttgtatataataaacttaaaatattacataaatcacttcaacaaagggttaaaaatgcaaatgtaatgaaaatttcatataatggtaaaactttgattgataggaatatttcaacagatgatgttattattgaagaaaccaaacaatcagaatatgaacactttaaaagagatacaaagagacgttcatatcaagctagttttactatagaaaaaaatggtaaagaaattgaaacaaatatcaacaataataataataatactgatattgatatgaatcataatacttattcagatatcaatgaaaaagttaactatacaacatctaaattggtaaaaggtatcgaaagtttaagaaccaatttaaaacaattgaaagtaacggaatataatcaattatcgtcatcttcttcatcattaggaaactatagttcaggtaactcagagatgaatgcattacttttccaaatcaaacagtttagaaattatttagaagttgtcacttctgaacatcctcgtgaaatgctatttaaaaagccaatttctcatatacaggtaggtcgccgaaattcaacaaaaattcaaaaatataattatcttgatatattaaatgataatcttgatgaattaagacataaattagattcttaaagttgagatagattgatagatttacttttgtgattcaataatatcattgaaatatttagatactttttcatcttttatcttctccttattgattcttgcttcatttaattcatcaaaatcttcccttactttttcaatactattatttaaataatattggtatagttcttgcttgaaaaatggtggtatctccatctttaatctcttctctgtagcttctataaattcttcaaatttgttctctattaatctctcagacatttgtctattaacatttttctcccatctttgctgtaatttttcaagttctttatcagttgggttccatctagattttagtattttagaaattgcaaccggtgaaactttgaaaaattcagctaatttatcagtacttaattcatttggaaattcatcgtgtaattttcttattgcacttgctgtacttggacttaattttttaactttacttaaatcaattttactagccttttccatcaatgcatatttatttttcatccaaataggtaaaccttgcttctttctccaacctgttggtggtttcctcttctccattaatttcttctctttctccatttgctccttctctaagattttagtgtttttcaataaatattcattccaatctttcttgttatatactttacctctaaatccaccgggaagttcatctaaatcggggagtttccaatcatttggtctacctccatcctttaaacaatatgacactctatgaaatcctctctttccaaacactcttaatatactactattcagcaccattaccattaaaagaagataatatgtaaagtaattaggaaaagaaacatgtcagaaaactgagtgaaaaatcatgtatcaaaaataaataaatttttctcactgttaaagagataacctgtttttattttaaaagtggcgttgattttgttaaggtttatactatcttttcttataacaacttcatcatatagatatagatacagagatatacacatagagatataaatatagagaatgaacattgtcaaaagattctttaagaatcaaaacacacaaccaactgatgatgcaaatattataccatcaggtcaactgtatcttgttagatcaccatcatcaccaaaatcagagaatgaatgtttatataatgatacgattttaacaattcgtagtacaaataaaccatttaatcatcaattaattgtttggaagggtaatttatcagattcagattctttaagtgatgatgaagataatgatgaagatttaaatgataattttttcgaaaatgattcaaatattttaaaatcttttataattgattcaagtttaaaaatttgcttatttgagagatataatgaaaaaataatctcttggagggatatggaaggtgattatggtgatacattcgaatatagaataaataaaactgtaccaattgacacaattgaacaatttatgacatcaatttataaatacaaatttgaaagaaaatatcaaaaatcaagctcaaatatcaatataaatgatattcaagaatttattgttgatagtaacgaagttaataataattgtttgaattctgcaaatacatcatcaatttcaagtgcattaaattttcaagatttattacaatcatcaaagagaaatattgtagatgatgtagaatttgaatccgaagttgatgatgatagtgattatgaaaatgaaaataataatagtaaaccaaataatattacatttgataatgatacggggaattctgaggatgaagatgctaaatttgttgatgcatctgaaacattaccaataataccttcatcattaacatctacaactcctaaactgtatattgatcaatttagttgttcaatatataaatataatatggaactacaagcttttaaaattcaatcagatacatcaattgttaaacttttcgaattaagtaattgggtttatgaattagagattaatgatgaattacttgatattaattatattaattgtttaattgaagattcaattgatccaacatttaaatttgaacaactatcatttttattcaatgttttttcaaatggacctccaactacttggctaattaaattcaatgatagagaaacttatgaagaatttcaaataacaattatgagattattatggcaaactaaaaatgaaatgtcttatgctgttagtaaaaaagatgaagaatatttaatcgattcactggatcttatggatgttgaccaaaatggaggtataaataaggaagaagaagaaaatgaagaagaggaagaagaacctgaatccgaacctgaagtaaacaaaagatcatataattttagaaagaaaaagacaattgtattctccgattcagaggatgaatcagaagatgattatagtggatttgacgatgatattaagaacaaagcattagcaattggtgataaaacagatagagcatttatttcaagaggtaataaactgggagttttcaaaactgatgatgatttaggaatagaattcattacatcaattaataatttatcattaaataataattctaagaagacagttaatgcagataagatgatgcttttgaataatgatagaacaatgattgtccaagattttaattctaaaaatcagttacataagattgatttagaatatggtaaaattgttgaagattggaatattcaagattctgatagggataataatcttaacattgaatcatttacaagtaataataaatttagcaatttatcaaatgatgatacatttttaggtttaagttcacaaacaatgtttcgtattgatccaagagtttctaaaggtattattaaaccaagtaatgataagaaaacttataaaactaagattaatttcaaacaaatttctactactggtaagggatatattgcagttgcaagtatgaatggtgaaattagattatatgatgaattaggtaaaaatgctaaaacattattacctgcattaggagatgaaattttaggattaacaacatccaataatggtagatatttattagcaacatgtaaaacatatttattattaattgatgttatgattaataatggtaaaaatacaggtaaattaggatttgaaagatcatttagcataagtgaaaaaccaattccaaggaaattacaattaaaacctgaacatattgcatttattaaaagtaaatatggtaaatcattacaattttcagttgcaacatttaatgagacaaataatgaaattgaaccaacattaattataacatcaattggaccatatgcaattacatgggaatttaataaagttataaataatcaaagaaattgttataaattaagattttataatgataatgttataatgggagatttttcaaataataataattcaaaagttatacttacattacctgataatataacaatggcatcaactaaatcattccgtaatccaaatgatgaatttaatttaacaaagactaaattctaaacatattgtataatcatctctttcttttgtataataataataataataataataataataataataataaatagtaataaattcaattcttatttcttgaaaagaaatgtatctttcatttcttgtctccatatttgcatatatgcattccatttatgtttcctagtaggtacataacttgattgatatgtccttcgttgtgatctattaattctagtaggacgtggtggtaatggtaaatcattcatcattgcatgaattactcgtacataataatgaaatgttttagatgtcattaactataatcttgttagtatattgtttgaaaagtcataataaatttgtttgcctatatacttactttcctatatagccattgttcaagcattatctggatatggttgtcagaagaaaggaacagtgcccagaagaagaaggtctgaatctcatcagcatcagaaacgaactggtacaaaaaaaatttaaaaattacttactgagtggatgatatcgatcctatttttctatggggtatattagaactataaaaatatatgaagataaagacaaaaataaaggtaaaagataaagcagaagcaaagcagaatatgtacgtgtaaataataacttagtttgataccagtgatctcagctcatagcagaattgaggtttctctgttttccaaagcaaataaagtatactgtgattattatgttcatcatattgatattggtattgatgttgattataatttgataatgttaattcaacaatactggaacgttgtaattcactaatctctctattaaattgaattaagtttaacctttcatgatattcatcaagtatattatgattattacctataataatttcattcatgtatttgactatagataataatttgataaaatctccaatgataagtttataaaattcaaaaactaaagtatttgaattaacattatttgctaatgatgatactaattcaataagattctcatttgatttaaaaccaatattccaatcgttattcaatgatgcagtgtttgcattgaatgaatcttccttagtttggaaaattttcttaaataattcaagttttaaatccaaattagttgtttcaaataaattcaaaattgaattaactaaatattcatctaaactttcattcttacttaaatctttgataagtttaaacctctcagaattaaatgaagtaaaatttaaattataattaaatgaattagaattaattttagtattgatgattttcaaaccaatattatcaattgtaatagcattttcatataattgttctgatgataacatatcaattgaatgtgatgaaatattaaatttattataaccataattatttaggtttaaactattagaattagaattataatcataatcataatgataattatcatcacttaaaactgaatctattaatctattacagtttaaaaaagcatctaaatgatcatcaatacttggagttgttgcagttgtactagtaccagaaactgatgcagaaccagaatctatgttatagttattattataattattatttttcttatcaaataagaatttcaaaggagaaccagctcttgaaattggaggagataaagcgtcaattgatgaactaattgaggagaatgattgattataattattttgtagtaaatatgttctattattgttataagttaaatctagattattattgataatatttgttgcagttgtattaatattaagatgatcaaatgagtaattcattgaattattatcaattgtattatggaaattattatcaaaaactttaattgttcttggaatattactattattattattattattattattattggtattcatattattattattttctatgatattattgttgaataaattatttatttttttgaaacttttattgaaattgttaaccgaacttttaatattacagatatttgaaatatttttatttttattttttgaattaaatgaagacattataattccaacaataataaaaatatgattcaactatctgtaatgattttttttatttcttttctaattgttgacaggaaaatagaaaatagaaaatagaaaatattaatataaaataacgtttagtatggaaatggaaaacgtttatctaatttttaaatgcgattgctgaaagacaggggaactgaaatggaaattaaaaattcgaaattgaaactgaaattgaaattaaaacagtgaaaattgaaatagaaattgaaatagaaattgaaatagaaattgaaattgaaattgaaattgaaacggaacttaaaattgaagtattttgttaaatcagatcaatgtggaaagataaggggaaaataaaattcaaaatgcaaggctcaaccaagctttaataataatgagagagatggaaaaagacagagagacagggagacagggagacagatagacagaaagctgatatatgtagatatattagtataagtgaaaatacaaacaaatgaaagttaaagataatgaattattcaaaaagaaaatcaaaactttagatgagccctctttttttttttgattttaaaccaagaaacagcagagattggaaatttgtgtcttactttatgaaagaagtatttagaaagcataaagataaaagaataaagataaaaaataaattatgggaagtatcaaatgtgagcctgtggaaagtgggaaaataagtttcttttatattaaaataattgaaagggggttataaatgaataatcatagtgattgatagttaattacggtgaaaaggggcacttttaaattaattagggatgtaatttacgtgaaatggatctaaaacggggcaatttagtaaatttaataataagttaattaacttttaattaaaattaaataaaattaattaaataattatgttagactggtaatatttcctaaacgggaaaccccacagctgtacaccattctcatatttacacaggtgaaccaatgaaaaattacttcctcactcgacataccctattttgttaaaatattgttttaatataagtgttgtagtacctgatttaacttacatctgtttaacttcaactccacagaacaactatgtctactatctttagaagatcacttacttctttaattcctccaaagattgcttctcctgctaatttaggttcaaatcctgctgcaaagagaatgcaaaatattgttgctttctattcaaaattaccaagaggtaatgcaactgttgaaactccaagaactccatttgcaatttacagagaaacttatagaaataaaggtagccctgtcttacattttgccttaggtttcctcttccttggttacggtttagaatattacttccatttatctcatgaaaaggaacatcattaagcatgaatcaattctatctacttatttatttatttatttattatatagtattatttatttaactaattctaacatttcattaaatgataatttattatatggtttaccatctttattaccttgatcaatctcaattgaatgaattttctcccaatcttcccatttaacaattttatgtttcttattttttaaaattatttcaatctcttttctaccttccttattttcatcattaattaaatcttcatcattaattatcgtttctgcaacattcatactatcattaactgtattattaatattaccttgtgaattatttgaaacccatccaacacaatatgaattcttaatattctctattttaccattattattaattattttaccattctcaaatagtataccaatctctttaaattcatttaatggttcacatttatatcccgttgctaatataactaaatcacttggtatactctctattttaccatctgatttatattcccatttatcattttcttcattatgaaccatcttactaactttaactaataattccttaatattaccatctggtttaaccattataccaattggtgatcttaaataatttaatttccatcccttattaccatttccattaccattctctttatatttatttaataaatcaattctacgtttattaactctatctaattttcccaaactctttaattgttcatcaaaatcttctttattccatcctttaaattcaacaccttcatctctcatctctaataattctcttaattctttattagtaaatttagaatctaaaatacctcttctaataataacattaacatttttaacatcactttcctttaaaatatttaatgcatgattagaaatatcagtagatttccatcttttattaacatctcctaataatatacgtataatatcaattgcaacattacctgcaccaataattgaaatatctttaatacctttcaatgatttaataacatttttgtaattatgattaccattataccaattaacaaaatcaaatgaattaattatattttgatgtaatgaacctggaaattcaactttattaccatttgatgatccatatgcataaagtataccattataatttttatataaatcatttaatgataaatctttacaaatttcaacattaccaaaatatttaactttaccggttttaataaattcactaatttcattaaatttatcaatacaatttttaacttctggatgatcaggtgcaactccatatctaactaatccaaatggtgatggatttttctcaaatatatcaatttgaaaattatttggttgttttttcaaaatttgtaaaattgtataaaatgatgatggacctgatccaataactgctaattttttcaaatttgaattagttgataaaaatcgacgtgttatgttcatttaatggtatttgtactttactttactttagttataaaattatatagaaaaaaaaatcccatgatttgtatacattgattcaatgaaccattaagataaatttcatttaaatcaatgttttctaaaatttgggtggcactgaaaatttccacgtgactcaccaatttcgctggggtaattccactgggggggggggacccacgcacggtctaccatttcacccagggtagctcccgccaattaaatattcatatacaatctcttagattcaattaaatttaaattatcacaacaccattgaatatctcttaataatttctttggatcattatttgattctaatttagcaatattaagtatatctttataattattaaatttaattttttgttcattaataattaaattatcaataaaatcaataaataatcttgtatcaataatttttaataaaacatcatcaactctaataaataatctttgtaataaaagtaaacaattatccattactctaattttaacatttaatgatgatataccattatctgctaattcatcttcaaataggggtaaatcaatgaaaaatttaattttattattaattgataatttttcaattggtattttaattgaatcattagtatcaattttccaatcatttccactatttattgaaccattatataaagtttcataagtccaattaaatggattatgaatattcattggtatattattaatattattctttaatttattattaatccaatcatttgaataacttactttaattaaatcatcatgattaactaattttaatgcatctaatgcattaaatgatatattgaatttatcattatttgatattgatattttattattaccgaaaatcatttcaggtattgggaaattaagtattttttcaaaatttttaatttcattttcattaagtattggatatttccaacaatcaattttaaaatttttaattgtaattgaagaagttggtttataattagttattatattatcatcatcatttgagtcatttgatgaagaagttattatatttgatttgcttatagggaaggtagtatttaaagtgggtgaaacagctggaggaggtaaatttttattatcatgatttttattattattattattattattattactattaacaggtctatttcttgaagctattgaagctgcatgagataatctcgcagattgagctaagttatccatttgtttaaaaaagagagtgtcgtatataggactagtttataattaattaggtgtcaaatttcgtatagacgacgcgatgacgattattagataattttttaaagtgagaaaaaacatgttattatgcttagcatgaattttaacaattatagtgatgatggaatggattatatcttattagtagtagagtaaagtaaagtaaagtagattgtatatacacactaaaggacaattataatgaagaaaggaataagacatataataccaataattggtattttaataatgattataatatttataagtcaatttcaaaatagtaataaaactattgaagaaatgaataaaataaatgatattaccaaagaaagaggaaaatcaagagataaattaaaattaaaatcaacatcaaaatcaacaacagacatatcatttatgccaaagatgccatcagaggaagcaagagcagaattaggtaaatcatcatggagattattacatacaatgttatcaagattcccagataatccaactttagaacaagaggaagatttaagggaatttattagattatttagtatattgtatccatgtggagaatgtggagaacattttagggaaatgttaaagaaatatccaatacagacaagtaatagaaagagtgcatcaatgtgggggtgttcagttcataatattgttaataaaaggttaggtaaagaaatttatgattgtagtacaatattagaagattatgattgtggatgtggtggtgaagaagaagatgaagaagaagaagaagtagtagatagtaatagtaatactagtagtaataccaatgaagcattacgtaatttagaaattgaattaggtaataaaatgggtggttgattatttattcaattattacataatacacggagtttacaattatttatttatttttaagataggataaattaaattaaatagactagtataaatatcaggttatttcccccatttaatttcacctattaaattaagataaatgtagtgaatgagatcaataatagtaataataatgataccccgggttaataagatagagatccctttagtccatctaagattatacaaatgatttaccccgcttaaaataacttaaagggggtgggaaattattatttaatcggattccgtttattaatattttaaattattttagaatattttgagatataaatacaaaacggattccgattaaacgttctttatccggcagtttctttctcaaaatttttttttttttttttgagtgaattttaatttcgcggaccgatcaaataatttcgtttcaatttcaaattattgaatttattctatatatcctaaatacaaccgtttagttgaaggtattcagttaagagaagagatagaagatccccctttctttaaaatctgtttttattatctttatctttatctttatctttatctttatctacactcatctttccttatcgatctttatcgatctttatctatcttcaccctctttattcacaagattaagatcaattttcatcatgtcacccttcaaacctcaaatacccaataagattcatataaattcaaataatattaatattaataataataataataataataataatatctcaactatagattcaaaaccaaaacatcttaaatcttgttctcgttgtaggaaacataaaactaaatgtaattatattgaaactaatccaaatccttgtacttcttgttcaaagagaggtttaaattgtcatttagaattagttatacctgttaaacgttcaaatattattaaaaatttatcaaatgatattaaaattttaaaaaatttagttaatgatttaattattaaagatcaaaaattgaaaaatttatgtattgaaaaaggtgttaaagttgatggtttaattgatattaaaaattataattataataataataatattaataatataaataccttaactgatatagatgaaattaatgaagttaatgacatacctgaatcaaatgattttaatgatattgatataaaaaatataataccttcatcacctaatatttcaccttcaaattataaattattcgatatttgttgctatacatcagatgaaattaattctttctttgaaaatttcaaaaatcattatctaccacttattccaatattcgatattaaaatttttaataatccaactcttttacttgctaacaatcatcttctattttggtcaatagttttcattatctctaataatacagatatctttaataatttcattcttaaagagatacttcattttacatctaattctcataatattgataatgataataaagaaaataatttaaatactatttattcaattgttttattatcttatttcccaatcaaaattaatataaataatttagattctgatgatgatttagatacttgtttctttcaatggttatctatttcaaaaaaatttattcattctatttcaaataaaaataatcaatttgatgaaaataacttagaaatcaatttatatgctattatattcattttaggtaatttttattcattaagattaaatttaccttgggatcaaccattagattttaatttaaaacagttgaaattatcaaatacatttcttggtaacttacttaatatttcatcattgttgaataaattaatgaataattttacatttaatgacaattttaatgaaaataatgacaatcgaaacttacttattaactcactttcaaattggaaatttaacttacttaatctaaagaaaaataaatttaattcaaaatatttagatcccgcatttgaatttattgaattatgtattaatttatttcaaaatcaatcatttattaataataatactgaattattatttaataatattttatcattctataattcaattgataatattgatatatcaatttcaccaattttcattaaattttcacttgaatttatactaatattcttaaataaattatcatattctcatcatttcatttcaacttcaaataaccaattaattattaaatcatcaaatctttattcaaatttatttaataaattattaacaattatcaattataatgatacaaaaattattttcaatttattattagattttgattcaaatattaaatttaatgaatcattgataaatatacttaatatgaaatcatttaaaaataaattattcccaggtatgattaatgatttaaaaattttagtgcaaaaattcaagtcagctgaaaatactaataataccactatcgaagatttaaaagaatttttcattaatgaaaatattaattataattcatattataaaaattttacattatttcaaaatagttttgatttagttttcctttattcaaatgaaatacttaaattacctaaatcatcaactaatttaaatataacttcaacattatcaacatcttctacacctgatttattacctgaattatactcagatacttcatcatcgaaaacaatttctcaaccagtatctcaattacattcaccaaatcattcacttaatttacttgaaccaattacaattaacaatgataaaatagatttagataatattgaattagatttattatcctactattaaattaaaacactttttatattattcttgccttttccaaaaccccctgctgtttaatgaccccttactattatattctattcctttatacacgtttatattattaatgaaaatcttatcttattcatactacataattacacaatcatcagcaccaaatccataaacaactttatcaatatttttcttaattttataccaatcactcctacgtgaaacaaattgataaacttcttcaggtgtgaaaattccattatctctaccaatttcaattattaatttccccaattctttacaatgtaactttatttctttattatttttattatcaattaaacaatcaattaaatataattgattaatttttttaaatccaattaaataatcaattgcaggtttaattttattaattttataaaattcatataatttattaatatcataattaaattgtataccaccaataactgaaattttaaatttttttaaaattaatttaatcaaataaataattaatctttcacctaattcttgtttgaaaacttccataattgatttttcaatactttcttgtaataatttaaaatgattatttaaaacattaatataaatttctgtccattcactcattaatcctgtatttaatcttaattcttcattaaatttcaaattataaaccatattgtcattattagtatcattattcccattttcaattgtactaaaacttttattagatgattgagattgtggtaataattctaaaccacctaatttattctcaattttaaatttaatttcattaacaattatattaattgaaatatctaaaccatttgcaacataagtatctaatatattttcaaataatttaattgatttttcaattccattcattttaagaaaatcttttgaacctccattacttataattccattattaattaattcatttttatagaaaacatcaatcatttgtaaaattaaatcaccaacttcaactaattcaataaatttattaacaggttcaattaatccttcttcttgttcaattggtttataatcatttaatctatttaatgcttcttgaaatccgggtttaatatgttgattgattaatatattaagaaattcactgaaaatattttgacatgtttcattaatttgtttctttaattgtactgtaattgaatattcagttaatccaattaataaatcataactatttttaatatgttgtaataataaaattgttaaatcaagactaattaaatttttcaatgattcaactttagctgataaaatctttaattttgcttccattttagttaatttattttcattattttcaggttcatccttaatttccttttgtttattattaaatgtaaatagatttgtaaatgtattaattatttcataatttgattttttattattattttcattatcatcattaataactaattttaaaatttcaaattcaatatttttttgaaatttttgattatcagatttccatgattgaattaattgaattaatgattgatggcatttacgtggtaattcaatactaaattcaattaaatattgttcataataataattaataaattcacatgatactttaatataattcatattaattgtttcattagattctaataaaatttcagttttaggatattttaaattttctaacattttaattagtttatagtgtaaatatgggacacattgaaaaaataatgatgtttcattaattaaattgatctttaaatcattatcattatcgttattatcattattattattatcattatcaatgttctctatcccttcttcttttgactgtccatcacctactaccttttctttaattattaatccatcatcatatgaatcaatttgtttagatttgaatataattttatcaattaatccaccaattaaataattacttaagaagttttccaaaactttaagtataattggtatttcatcaatacttctattaagatttttatctgaacttttaaaaatattatcaatttcaattaactgattatttaacatttccgttatattattgaaaatttcatcaactttttcaaaactaaatgaatatcccttcactgtacctcttttatgtttctgtgaggtattatgattattattttctgattggaaacattcattacttaaattatcagttaataaattaatataatcatcattatatttacttataaagaattctaataaagaatctaaaggatctatattaattctttcatttgatatatttagacaatctaaagcagttataagtgataaaacatttgaataattttgaaatttaagttgaagttgaatttcatttataattgaattaataaataaatttataatactattaaatcttattattaaactatcataattattaaatctattcataattataataaaattaccaatatttgaaaataatttagcctgtaatattggtgtattataagtattaaaaattgttaaattttggaaatttgtataattatctatgagtaattgtttaacaattggtgatattaaagaataaattttaataaatgtatttttagctatgaaaggatcatttatctttatatcaagacaattcaatggtgtaataatgtcaataatattattagtttcatcatttccattacaccaaatacctaattttttacaataattaatccaaatattgttattttcattaataaatttattaatttgtttattaaccaatgataaattaattatatcaattacatgaactgcattgagacatatggcatcaatgatattctctgataacccgacgtcatactgtaatggtagagctactctatgaaccattaaagaaagaggaatactcagaaaagcatcagagctttcaccaccttcaccacctccagaaacttcagagcctccagatcaacagtggcaaaaattaaaagaagtgaattctatagataaaaaatcagacgacgcaccgacgcagagaaagggcatcggttaagtacggttagtttctttctatagaatcttcctttaatttccttaatgattaaagtttatgagttttatctcttagttttcttttgatttggtttggtttatattagcaattaacacaatgtcattaggtactctttacattaacccacaatcaccaagatctacttgtttagtttcaattatcaaagctttaggtttagatattaaaattcaatcttttgaagaagttgaaaattttaaagaattattcccattaggtaaaacacctgcttattatgaaaatgatggttataaactaactgaatttgttgcacttattgaatatttcatttcaatttcaaataatgaaacttataagcctaaaaatattaaggataatgtacaagttttaagatggttatcatatattaatcaagatatggttaatgtttggtgtaaatttatttttgcttcaccaactgatgaaattaaaaaaattaattctgatgctcaaagagctcaattttcttatttagaaaatgaattatcttctagaccttatattgcaggtgattatattacaattgcagatatttatttattttcatggtatggtctcttctctgatgttattggtggtgaaattaaagttgatttcccagttttaactaaatggtatgaagatgttaaagaaaatgatgcaattgcaaaggaaattgctaatccttagtgttatatagatattgatattgatatagataagattcctttaaagctatagtgtagagtatagtaactatacgattacgtaacctccagtggctcaaaaacttctctcaaatttccacgttgcatttttcaaaacttcagccttactgtatataattcttacaacaatacaatggcatgaggtaccctttacattcatccaagatctccaagatcaaattggttacctttagtaattaaacatttaaatttagatattgaagttaaaatttttaacgaaactcctgaatttaaagctaatttcccattaggtaaagcacctgcttatttagaggaagaaaataattttaaattaactgaatttgttgcaattgctgaatatttcttatcaatttcagataataaaacttatattggtgaaaatttaaaggataaaatgcaagttttaagatggttatcttatgcaaatcaagatttagcagatattgcaggtcaatttttctttgttgcaaaaactgatgatgaaaaggctaaactttcagctaaaatgaaggatcaattaaaatttgttgaaaatgaattatcaactagatcatttcttgcaaccaattatattacttttgccgatgtttatttctttacatcttataaattttatggagcaattgttggtggtcttacagctgattcttacccaaatttaactaaatggtttgaaactgtgaaagaaaatgatccaattgcaaaggatattcttgctaatatgtaaacaattcttttatttacttacgtataacaactttaggtttactaattggatcaaccaataattcaacattttccttaaatttaattgtaacaatcttacccattctcttatctctatcttttaaccttatctcctttaattcttcaatattatcatttgtaataggttcaataaatggatcataattatcaatttgttggattcgtcgaatttccttctttaacatatcctctaatgttttaactttaaaataatttaataaaaacgatctaatctctctaactgttaacctatattttaatatcatttcataagtatttgttggatcatttatatgtgtaattgtacctaataattgactcagcctataaatatgttcatcactcagttcaatattttcaacaacataattactcagtatatcctttaatgcagattttcttaatcctgtacctaatattgataataattcaatacaattatcaacttcatttaacattttcaatctatcagatgttgtaaattttttctcccttctggataatttctcatgaatcttattatagcttgcatcatctaatggatcaattccaactttacctatatttttatcaggtcccttgattctttcatgatcaattaaattaatctcaaatttactcatatcaatcctctctttcatatcatttaatgataaattttcatcatctttttcatcatctccatatttaaacaatttcaatacacaattatcacctctaaacaacctatcactctcttctttatcatcaattacattaattgtgtattgttccggtactgattcttttaaaaacttttcaaaatcatatttcttatcaccattaaatgattttcttaatgctgtaatttctaatcctgataatccatgtaatccattattaactccattacctgatacatcaaatggattccttactgggcgtcctcttcgacgtttaacttgtggttcatcccccattgtcttgaaaagaaagtatttatataccactgtcgtcattgattaaatggtaaacagcaaccgcgttgaatatttttgccaaaatgaaactttattatttcagcaaccttactaacgttgttttcatttcaattgaatttaatttttatcgtctatttatataagtaatgtcattcaaacctaaaaatcggttatctggcaataaacaactgaatataagtgggtataacgaaaattttaattataattacaattataactttgatgataatgatcattaccataattcagttatgactaaaaaggataaattaattcaaaaaattagatggaaacaattatcaataatttcattgattatattatgttcagttcattattttgaacgtttaaaaccttactataccatgaaatcatgtatgtggaataaatgggaaacttggaatgaatcaaatattaaaccttatcattcaattataattggtgatcctcaattagttgatgatttttcatatccagatcgaagtagtcttgcattatttattacaaagcaattaagtgataattatttacatagaaatcatattttttatagtaaatattttaaacctgatagtattatatttgttggagatttatttgatggtggtagagaatggaatgatactcaatggctcgatgaatatcatagatttaataaagtttttaatccaattgatggtatacgtcaatttagacaagtacctggtaatcatgatgttggatttggtaatggaatttcatttgaaaaatattcaagatttaaaggattttttggtaatgcagatgaagttattacaattggtaatcattcattagttttaatggatactgtttcattatcatgtactgaagatgaaagaataaataaagtaagtaaagaatttttaacaagttttgaagatccaaataatccttatcataaattaccaaaaattttgatttcacatgttccattatatagatttacagaattacaaacttgtgatgttcatagagaatcacagaaaccattccctgttattagaggtaaacaatatcaaacagttattgaatatgagataagtcaaagaattatcaatacaattaaaccttcattaattttttcaggtgatgatcatgattattgtcatattcgtcatccttatggtaaatcatttagtaaagaaccaattgattatgaatttaaaaaggatacaatacctggatctcattattgtgatgaagttacagttaaaagttcagcaatgactggtggtattagtaaacctgcaattcaattattaagtttgtggaatcctcttgaagaaaatgattctaataataaatgggaaataagtaatgttgaaggtaaaactgttgattctaaaactgcaattacacatttatgttatttaccaaatccttatcaaccattgattcactatcatattattttaataatgtcaattttatggatatttttatgtactgttaaggttgattatggtattagatatcatacagtatttcaaaaatatgttcttaaattgaaaaagttaattttaaacttattcagaaaagatattaaatctatggatatgtcacatttaaatcaaaaaaatccaaataaattcaatacggtatttgaatatattgttttagattgggatattgaaagaaataaagattggaaatcatttattttaaatgcatctttggtatcgacaacattatatggtacattattttggtacatacattctatatagggttcttttttgtgtttcagtttctttccatctctttatctctctactatgtacaattcaaaatttttatcaaacaattgagttattctttaatttaaaggataaactcaaatctaacatttcagcagaaagtgacgtgacgaaaagtgaatctaaaatcaataaacttttaacattcaatctccaaattagatcatcatcaggtgtttcaagaatactgctgaatgtgtaataaacaaaaaataatgcaaatattatgaaaacacggaataatcttgaacgaatcaattcaactaaatttctaccaattttagattttgatctatcatttgtaatcttagataatgtaacaacactatataatttaacaaatgcattctttaaggaatcatttgatacattattatgattaaatttctttatagttaaatcattaataaatttcatttgcataaatgtgaaaattgcgaaaattgtaaaacctttagtatgagttgaatcatcatcctctaatgtaatataaaatgcaattaataatgcaatcatttttctaaatgtaataaaaagatatgtcataacagcactaaaagctttaatatttaaatttgatttttcaataccaaaattaaatcctaattgttttgtaaagaacattaaactacgtaatattattgttgaaatattatacattaaatttggaacaaatccaataattttctgtaatatccccttattactaattgatccatcttcctctaaacctatatgatttgataaactcttataatatacaatgggagaataagctagtaataacattgtttgtaaaccaatatgtaaagctaaagctattttggcgacaggattggataaattcaaagtgagcaaaaacgccaatgatgtatattccactactttccatacattgatgatactgtccatagacactacaaaggagtcatgatactcactcatcttaaacccctagttatcaaaaggatatattactgtttataaaaacacaaaatacaccaggccttagatcaacattaacaaattcatgtcgagaaaaaaacaatgctcagctcatagacggtgtttcagtttacgttacctttcttttaatctgtcttgttcttccctctttcttttgccttcctcttctctcctgctctcaattacacagtaatgactactcttaccgcctcaagtacagatagagagtcatctcctgaaactcccgcaacgacaaacttcccaactgatgatgaaaatgctgttgaaatctccggcggcgcaggcatagatacaattgcagataatcataacaccaatggattctgttctgaggtatcattagttactaagaaagaattaaatcattcaaataatagaattgctgatattattaaagaaggtggtgatgatttagttattgaaattacagaagcaagtaaatctaatgatgttcatggtcataatttacaaggatttattgtatattttattaaatttggaattatatcagttaagagacgttatagtgaatttgaatctttaagaacgtgtcttatcaaacaatttccaacattaatcattccaccaattcctgagaaacaatcattaaaatcaaatattgcatttacaacatccaattcattgggatttgcaacttcaacattttcaaataatatatccgatcataataaaaatgaaactcattctagtaatggactttcaagtaactcaattgatagtgaacataaagatgatggatttttaagaaggtatgaatcagatccaataattaatttagttgattataggaagagaatgttatcagaatttttgaacaaatgtatgaaaattaagttattagtgaagagtaaatttttcttacattttcttgatcctgaaataaattttatggattatgttaatgataatgaaaatcatacattttataagacatcaattttccaactttcaccaattgatcctttaaataatcttgaaaatcaattatatttaacattaccgataccattatcatcagattcacatttatttaaagaattagcggatgaggaacaatttcaaaaatttgttagctttgaaacaaaatttattaaatatgaaatggttttaaataatataacgaaaataaataaaaggatattgaaaaacattagtagtttatcaaatgatttatctgatttaggatcaatgtataatcaattatcattattgcaagattctaataaaattgaacaaattggtaaattatttgaaaggcatacaatacttttatcaagtttgggtaattcaattaatgttggatttttagataaacttattgaattaaagaattttagtacaacatgtaaagaattaatggaatataatagaaaaaaaattattcaatttaagttaattgaaaaagaactatataatacccgatcaagatataaaagatatgaaactgaggagattaggattaggaaaattgatcaaaaaactgagaatgcattacataaatcacaaaatggtagaaataatggcgtaacgaatgaaatcaataataataatagtaataaaaataatgagaatgagaatgatagtgatgaaagtcgatcaacaagaaattcagatgagtttagtgaaccaccaattactgatgaagaattacaaagtgcattatacagtaaatcatgtaagaagacaatgtatggtaaaattccaggagttaataaacttaataatataatacttaaatatgttaatgatccaaatccagatgagacaagaagaaccaaattttataatttaaagattagaatgtttcaacttgagaaacaggaacaaattttacgtaatgatttaaaaattattaatagagatgttatggtagaattagaatcattccatgtatggtttaaatcagaattatcttcagttacaacaaaatatggtacatttttaacggagtattttggacaaagtcttgatccatggttagagattcaaaaggatgattaaagtttatattgtataataataaaaccattaattctatttccatttctattactattactactatctcggtgttgttatattatcaactccgagatttacgtaatctcatcttataatctaatctataatctattgtattacgtaacaaataaattaaattaaattaaaaaaaaattaattgtttaaccctctttacggaataattctttattaattaaacttagttaaacatttgatccaattaaatttgattctatattcaggtaaagattgctttctttatacaatttaatcaagtaattaacaaatggctagaaatacaaacagctcaagacaatcaagtgaaagtccaggtcttacggaatggaatataattgatcagttagaaactgatgaagctaaacaagatggcgttaataaaattaatgataaagttgataaaaaggaggatatttatgaaacaactgatgcttacacttctggagttgaaactgatttcatatcagacaattacacatctggtgtagaaactgattatacaacggataattatacctctggtgttgaaactgattatgaaactgataattacacatctggtgttgaaactgattatgagaatacttttgaaagacctactcaatcaactagtagaactaaatcaaaaagatctagtaattctagtaaatcgaacaaatcttatccatttgctaaagaattgaaaattttcataaattcacatccatcaatatatgaattcatacaagcatcattaggaattgcattattacttttatcaattgatttttcatcgagattattttcaactttaaaatatggttattatgattttttaattgaaactaaaacttatccattttttggacttccaaataatccagtatttactgttaaacatgaagaaaaatgtaatttaatttatcaaaattgtcaaaatattatagataattgttattataaaacgtctaatatggataaatgtttagttgaatatatttcaattattgatcaagatgcaaaattttgtaaatggaatgttgaatcaattttacatactcaaaaggatcatttatttttattatcattttctaaatcaattaaaaattttgcagattcttccaaagatactttaaatagtgtagttaatgattatgttattggtggctcaaagaaaggtgttaattatctgtcccaaaaaatgaccaaagaagaattgaataaaggtgttgattatgcttcaaaggggtttaaaaaagttggtgaagttttccaaaatgaatatactaaggaagcttatgataaaactttgaaaggtgttgatttaactggtaaagtgatagttgatagtacaaagcaaggtattgagtatattaaaggtattgattatcatcaacaatataaagatactgaaaaatatattgcagataagtttgcttcttggttttaaatgttatatgatgataatatacagtagttggggttatggtttttcatgtttttttttagttcttatatatcttattcttttgttctacattttagttcttttatttttacttattatggttcttttaacaacggttctttgctctctatataaattttttaatagcttataagaaatacaaatttacttaaagatattatttatacaacatagatatgatcaaactttaccatactcaaaaatgtttgatataacttctttaaaagtaacattaatttctaatacatcatcttcggtatctttttcagggttagcctttttatttcttgaaattaaccatgatctaacgataactaaagttatacctgccataaaataacataaaccaacgaaaattgatgcaggttgatattgagttggattttgtggtccatctttctttaatgcaataccaatgattggagatgcaaaaccaaatgaagcaactgaaatccaacttaatgacattgcaacaccaaattttcttaaaccaacaattgaagcagtaatagttgataatgttaaccaaattgtacccattatagaacctgaaaacattgcaaatacaattgcagttgcataatttctacaaggtatccacattgcccaactgaaaagagcaactaaccaagaagcacaaattgtaatattaacaggaccaattatatcaccaattctaccacataatggtctaccataaataacaccaactgaaaccatcgttgaaacaactgatgcctgatgttgattataacctaaagatcttgtaaaatcacctaaattatataataggacaacataaccaaataatgtaaacataatccaaataagtaaacacagacaaccaaaatttttccaaattaatttatcataaactttataaacaggtttaattttatcatttcttgttttaactaataataatgaaattaaatttaatccaatacacataattgcttgagctcttaatgaccatctaaaagatttattttctaaaactggttgtaaaccaatattataaacaataccaccaatacctgaaccagcagcttgaaaacccattgctaaattacgtttaccacctgggccacctttaaaccattgaggtacaataccaatattagcaacacaaattaatcccataccaatacctgccagaacaccttgagtacaataaatttcccaaagtttagttgaataagatgctaacatataagcaacaaaattaattattataccaattaatataactgatttaacaccaattataccaactaaataattaataaatggagacattattaaacctgaactaaaagttaaaccaccaataattgcataagaatatttatttgcaccatcaaatatattatctcgtaaataagcttgtaaatataatgaataagcagaatttgcaccccaagtattaaaattgaaaaatgcacaaccaataactgaagttaacccccaacctgaaaatttatcaggtatttcatctctaactgatttaattgattcaattcttgataaaggttttgtaaaatcattatcgtcattatcataattattatcaatatttttctcaagatcatctatggggtgtattgaatcaatttctaatgactcattttttcgatgataagattgaatttcatgatttgaatcaattgaaatattatctgtattattaatatctatattattactattattaatcatttttgtcttgtaatatattctgatataatatataatcttaatctatctatcaatatataatatgtcccctttaattgaatcaaattaaataaagaataccatcatttaaatagataaacatgataagaaaatccagtgatggagaaaaaaaaaatttaataatttattacccgttttcagtaataagagcgccccaagtgtcggaatcaatgcctaatggggtaagtctcggagatttatattagtaatagtaatggatatagagaattgacaggtgaatcatccagtaagggtagtatcacggtcaattcactttatggggttattagtggtagttattgtagtaatagtaatagtaatagtaatagtagtaatgataatattacctaatctactctattacgtaatgtattacataatgaaaattttaaatagaataaaatcaaatcaagtcattataagcagttcttcaaatactggttctttaacttgtagacaaacagctgaatataccctttacaacttaattaatgtcagcaaatcctggtaattctatcaaagcattaagaactaccccacctgagagaggttcattcccattagatcattttggtgattgtaaggaagaaatgacaaaatatatgaaatgtttaaaattagttaataatgaaaatgcaccaaattgtagaattttagctaaaaaatatttaaaatgtagaatggataatgaattaatggataaagttgattggagagatttaggtttaccaactgatgaagaagagaataaaaaataatttttattagttaaagcttttatttttgtataataattttcgtgtaaatagataaatagatagaaaaatagatagaaaaatttgttagtgattagttatatataacatcgataaaaatacatttatatattattgtacagtgaatacaaaaagcggaatatcagttaatgagttcaggttgtattgaatcattcatattatctaatgctgtttgaatatgagattgttgttgatctaattgatttttcgttatttcaagttgttcagattgttcaggttgtaattgaggttctgttgattgtgaatctaattctgtttcaggtttcttcaatcgagtctctatatcacctaatagtgttaaagcttttttcaaaattattgattgaccttcagttaatgattcatttataccattagaatcatctgaacttttagatacaacttcattaattaaacttgatatcttaactatttcttcaaaatttgatggtattgtagtagtagtagtagtagtagtattattattattattattattattattattattctctattgaatgttgtgcaaagaaattagtttcatcatttaatggaattaaagtggttatatccttattactttgattatcatctattcttttttgttttttcaaagatttgattgatgtctttgaacgaggtttcctctttttagtattattattagtatcattattagtatcattattattatcatttgttattgatttattatttaaattacaaccagtatttgaagaattatgtcttaataaagtatcagctctagaaaatgatttaccacattttaaacaaatataaggtttttcctttgtatgaattttttcatgtcttttcaaatcataatttcttctaaaatttgatgaacaataagaacattggaaaggttttgaatctgtatgagttaataaatgagattttaaattatgtttccttgtaaatgaagcaattttacaaatttcacaaatatattttttctttttatctattgatgattgtatctgtgattgtatctgtgattgatctgctgtagcttcttctgatttaggaatattattattattattattattattattattattattattattattatcaactacagaaagaggttcctctagggatacatcaaccgatgatagcacaccatccaatacaggtccattactgtccatcatgatatgcccttgtccttgtcccaagataaagcacagtaaatacctataataccctccaaacaattcaattgtggcggtgccaatgataaaatagaataaaaattgaaaatacaataaatctgtgcaccactataaaataataaattaaaatgattaaacacatgcctttatctctggtacatgattataataataataataataataagttaggattatattaatttgccatcttatctttaattatatacacttatactgcacatttattcactattatacacttgaaattactaggtgatactgctctttcatactcaaccttctattgccctccaattatctcttaaatcttatcttatttaagtcttatcattttatcttatctttaagggatagatttttatattaatattaatattaaaaatgatggcaacaactttcaatacaacgcaagcatctcctaatgataatgatgcaaataataatactaataataacaggaaaagacaacgtttattatcaaatggttcttctaatattcaaatgttagctaaaaaacttcattattatgatgcaaatgaagtaattaatttagattctgatgatgaggattatgtatttaataataataacaataatcttatgaataataacaatgatataaataataattttgggaatttaaaccttttaaatgataatcattatattcatcataataatattaataataatacagacactgatgatactgatgatactgatgatatggatattattgataatatcgataataaattatttcaaaataataataataataataataataacaataacttatgtctagaaacttcaaccgttatctcaaataataccactaataataataataataatgataatcattacttcaattcttcaagtctttatcatgatcttgataatgaagatgctattcttgattttgataatgataacaatgatactaataataatcataaccatattgatcttgatattgatttaattaatgataatgaaagtgatagtaataacattgataatgaaactgaaaatatattcgatgataataatgcaataagtgattttaatgagaataattatttagatgattcatcttattcaaattatttcgaaaattattcaaataataaaaaaccaacaagacatatgagtatttcaactccatttaataattttttcaataaatttttaaagaagggtaaatcaaatgatttaactttccaaaataatgaaattatatttcaaaaaaagaaaaaaagaactaaatctttacctcaattagcttattcaaaattaacttattctcctgctttagatagagatgaagtctctctaaaaattggtgaaattcaagcttccctaattcaacgatatacccctaataccattaataataatattaataataataataactatacctataataataatactaacactttgaataacaatcaaaatacctcttttaataataataacaatatcaacattcataattcaaataaatcttatagtcttagaaaatcatcatttaaacaaaattccctttcatctaatcattcatattcatcatattctaaatcaaatactaattcaaattcttcagcaacaagttcttatgatgaaaaaatttttaatgattcaaataggaaaaatattaatttaattgatattaatgatgaattaaatagtaatcatataattgaagaaaatgatgatgaaaattgtgatgatgaagatggttattatattgttaaaaatgattcaacatttgctaatggtagatttattattaaaaaattattaggtcaaggtacatttggtaaagttgttaaagcttatgatcaaaaatctaattcacttgttgcaattaaaataattaaatcaattccaaaatatagagaagcttctaaaattgaattaagagttttaacaatgttgaaaaaacatgatccaaataataaatttcaatgtattcatttaagagaatgttttgattatagaaatcatatttgtattgtaacagatttattaaaaatttcattatttgattttatgcaaaaaaatcaatttttaccattcccaggatctcatattcaagcaatgacaaaacaattattaagatctgttgcatttttacatgatttaaatttaattcatacagatttaaaacctgaaaatattttaattaaagattcatcatattgtaaaaaaatttatcataaaattgattatgaaaataatgataaaagtgaaacattatttagaaaaattttaaaagatccaaaaatttatacaatagattttggttcagcaatttttcaagatgaatatcattcatcaattatttcaacaagacattatagagcacctgaaattattttaggtgttggttggtcatttccttgtgatatgtggtcagttggatcaattttaattgaattattaacaggtgaagcattatttaaaactcatgaaaatgaacaacatttagcaatgatggaaaaagttattggagaaccagttgatttagaaatggttcgacagtgtataacactttatcgtgattcaaataaaaataatcaatcaaatagtagatttgattcatcaattgcaaaatcattttcaaagaggagtggtaaattattattcccaaaatcatcaactgaaaaacatttaattgatgaagttaatcaatttaaaaatattgaagaattagttgaagagaaaactggatttaaatttaatttagattttaatgttaaagattcaatgaataaatttaatattaatcaaaattttaaacatgattatattttttggtattattatattgatttaattaaaaaattattagttttcgatccaacaaggagattaactgcaaaacaagcattaaaacataaatggtttgaatttggtattttagatgatggtattcaacaacaataataattattttcccactggtatacggttctgtattttattccttttcaattgtatttcaatctctatgatttggattgatatttcatttcatattgacatttattaccttttttctacgtttcctctacttggtttttcaatttgaacaatttgttatacttttttgtgtttttttttattttttttattttttttattatttatctgcttttcatcattgctttgggttttttatagtttataagttatttaatactatcataaatttttctagtctaatataaaatatcaaaatagaaggattataaatcaatcaatcaatcaatcaatcactataattgtatatcaaatcaagatttcgcttaatagtgtagaacatagcaaaatttccaaggctgtgctgtttttcagggtttacagtaatgaaccttaatgttatggactttacaccttgaagtgtttgttttagtgtaatattcaatgaacaaatcacatgagccgttcttaatcactataataatagcatcctaaagacaatgacatcctagaggaaaaacactggtaatatcttaaatccttattaacttttcgtatcaccgattatcaccatttacttatcaccgttaataccgggttaacaccggtagtattatttatatccttatttaatagtaacatgaatattgttatcgccggttttatcataaaatcaatagaaagcaatggaaatttgtcatttattatcatttttcaaacattgtttatctttatcaacaataattatttaaaggagacatttcccacaattaattaattatgttagttgaataaaaatatgttcttcattaaatatgtatacaaatatggaattagaaaatcaaactcctgatgaactgaaatatcaaaaaagattattttcaatctttttccctaaaaaagttcaaccaattccaagtgatgaagaaagaaaacaatatcctgaatttaaatcaaatccgatttctcaaatgatgttttattggttaaatccagttattaaatctggttttaatagaactgctcatcataatgattgttttacacttaaggatacatctgaatcaatggattattattatgattgttttaaaaataaattaaatgaacttacatcacaaaaagataatttaaatgaaactaatgttgttacatggataatgattttgattgctttatatcatactttcatgtttgatattaatatgaatatgcttttaaaagcagtttcagatatttctaatagtgtctctcctttactattgaaaaaattaactgattttgttgaaaattccgatattgtaaagcaaaaaattggtagtggtgttggttatgcaattggttgtgctcttttagttttcattaatggagtttccattaattattctttttatagaggtacaaattgtggtgcaaaggctagaagtgttttaattaaactagttttagaaaaatcttttacaattgatgctgaaggtaaacataaatttccaaatggtaaaattaattcaattatgtcaactgatttaaatagaattgatagagttttcactcttgcaagttttacattattattcccaattccattaggtattacaattgctttattaattgttaatattggtgtctctgcattagctggtataggttgttatgttctaatgtttttcttaattggatatgcttttacaagtttagcatctttaagagttttagcttccaaatgcactgatcaaagggttaaattaacaactgaatttttaagtaattttagaatggttaaattttataattgggaaagttattatgaaaattcaatcattgatgcaagaacaagggaaatgaaatatacaatgcaaatgcaaacaattaaaaatattttaatggcattttcaatgtctttaccaaatttagctgcaatggttgctttcttaacagtttcaaaagtttcacctgataaatcttctggttcaatttttgcttcattatcattatttcaatctctttctattgttttctttgttttacctcaatcaatttctgcaattgcaagtggtaaagttggtcttaaaagagttgctgaatttatgtcatgtaatgatgttaacgaaaatttttttaaaattgataatttaaatgattctcagtatgctgtcaatgttaataactgtgattttgaatgggaaattttcaataatgaaaatgataatgaaaatgataatattatggataagaaaaatgaaaatgatattgaaaaaattgaaactaaaatttcatctgaaatttcaactgacacaactgaaacatctttaaatagaaattttgattcattgaaagatattaactttaaagttaagaaaggtgaatttattattattgccggtggtgttggttctggtaaaacttcattattgcttgcactttctggatttatgaaaagaactaaaggttcagtctctatcaatggttctaatatattatgtggtgctccgtggattaagaatgattcaattagaaataatatcttatttggtaaagaatatgatgaacaaaagtatactgaaatcattaaagcttgttcattagacaatgattttaaacaaattattgctggtgataattgtgaagttggtgagcatggtattacattaagtggaggtcaaaaggctagagttaatttagcaagagctatttatgcagatactgatgttattttattagatgatgttttaagtgcagttgattcaaaagttggtaaacacattgttaatgaatgtatctgtggtattttaaaatctaaaacggttattttagcaactcatcagattggtttaattgaaaaagctgatagattagtctttatgaatggtgatggtacttgtgaggttggcaaaattgatgaattaaacgaatctttccctcaaattaaagaatttttcaatactgttgctaaaaatccaactgataatgaagataaggaattaaatgagaaaaaaatcaagaaaaacattgataataataaagtggcagcaaataatcaaactgttaataatgataatgttgttaaaattattggagatgaagagagagctgttaatagtttaggatttgatgtttacaaagcatattatgaatatggagttggtattttgaaattagtatttattccattatttttatcattgattattgctacaacattttcaaacatcttttcaaatacatggttatcattttggttaacagataaattcaagggaaaatcatatggattttatgttggtatttatattatgttcaattttttatatgttatattcacatgtattgaatttgctgtcattggttattttacagttacagcttcaaggaaattaaatattggtgctatgaaacgagttttaacagcacctgttgtttttatggatatttcacctcttggtagagttttaaatagattcactaaagatactgatgttttagataatgaaattgctgatcaatttttattagttgtttatccaattgggatggttgttggtacactcattttatgtattatttatcttccatggtttgcaattgctattccaggtttagttttcttatatgttttcttaacagcatattatcaagcaactaatagagaacttaaaagaattgatgcagttacaagatcatttgtctatactcattttaatgaaacaattgaaggtatgttaacgattaaagcttttggtagagaaaattattttttcaataaattaaatgatttaattgataataataatgatgtttatttccttacatgggcaatccaaagatggttaggtcaacaatttggtgttgttacatttggtttccttattttaatttcatttttatgttgttttagagttttcaatattagtgcagcatcaactggtttattattaacatatgcaatgaatgttccaccaatgttatcactttgtgttagatgtttagctcaaattgaaactgaatttaatgctgttgaaagattaaatttttattcatctaaattaatacaagaatctccatttgaaatacctgaagctgaacctgaaccaaactggccaacaagtggtaaaatagaatttgatgatgtttcactcaaatataggcctgaacttccatatgcattaaataatttaaatttgaaaattaactcagctgaaaaagttggtttttgtggtagaactggtgcaggtaaatcaacttttatgacatgtttatataggttaactgaatttgaaggattaattaaaattgatggtattgatattagtaaaattggattaaatagattaagaaaatcattaagtattattccacaagatccagttttatttaatggtacaataaaaaccaatattgatccaactggtgaatatgatgatgatacactttggaatgctttaaaaattgcaggcttaattgaaaatgtatcaacagttagggatgaattagttgttaaaggtaaaagtcataaatttcacttggataatgaagttgatgataatggatcaaattattcactaggtgaaaaacaattaattgcattatgtcgtgcattagttaaaaggacaaaaattttaattttagatgaagcaacttcaagtgttgattataaaactgatgaaagaattcaaaacattattagtaatcatttcaaggaatgtactgttttgtctattgcacatagattgaatacaattttagattttgataagattgcagttatggatgctggtagagttgttcaatttgatgaaccaaaggttttgtttgaagatgaaagtggtatatttagagaattgtgtaatcaagctaatattgatatatcatccttcaaatagtttctatagtttttatttgtgcattttgtgtattttgtgtattttgtgtattttgtgtatttcctttaattaatagttaacaataacttgctaccaattatactgataccaaatattacgtaatccatctgataagcgagtgaaaaattccgttatcaacgaatcacagttcctctctttaaactgtggtggtggttcacaacatgtttatatcaattgacctttaatctctgttgtttgtagagatatcacattgcaatgagtcatcagaaagtggttgcatacaatttcttcaagggacatccctccgttgatcttttaccaagtaaagaaattcttaaagcttcacaaaaagttttagaaactttcactgatacattagctcattatgatggtcgtgataatacacatccattaaattatggaccagatttaggtaatttagaagttagagatttaattgctaaatggaatgataaaaatttcaatttaacaaaaccaactgatccaaattgtattaatttaacaaatggtgcatcatttggtttaatgaatgcattacttcaatgtactgcaccatttgataatataacaaaacaaattttcatgatttcaccaacttattttctcattaattctgcaattattgatcatggatttgcaggtaaattaacaagtattgttgaatttgataatggtgatattgattttgattcattagagaaaaaattagaggaaattgaatctaaaactccttcaactaagataacaaaggagacaatttataaaatttatgatcctaataagccaatgaagaagatttataattatgttttctatattgtaccaacattttcaaatccaaagggtggatcattatctgatagttctaaattaagattaatcaatattgctagaaaatataatatgttaattatttgtgatgatgtttatgatttattagattttaagtttggtaaagatgaaaattataatcatcataagagaatggtttatttagatagagaaactttacctgatggtgaagaatatggtaatgttatatccaatggtacattttctaaattattaggacctggattaagaacaggatggcaagagactgcaacacctaaattagccaatttaatagcttcaggtggagcaaatatgtcaggtggtacaccaggtcattttaatactgtcattattggagaattaattaaatctggtgaagttgataaaataattgctaatttgaataaaatctatagtgaacgtgcagatacattaaagaaggcagttttaacatatttacccaatggaacaaagatttcaccagttgatggaggttatttctcatggatcacacttccagatgaatatgataatattgcaattgctaaagaatgtactaaaagaggtgtcattttagctacaggagataactttgaagttactggagatgaaagaggatggggggaacacggtgtgagagtatccatcagtcatctgaccagtgaaggtatccttgaaggtatcaagatatggggtgaagtgtgtcaatccaatggtaagagtagtctgtagaccgacgcgactgtttagacctacagggtcttaaatttcctctatagaagacgtattcattaacattataaggaattgtagattacaatgcatgcatttttatttagtaactttacacttgaatacttagacttaaattcaaattaaacagcattctattgaaattaaaggacttttgataatgtctgttcaactggcaccactattattggtgttgcccaccctattcgtatctctaaatctaacaattctaccctcatttgcttcatttcctgttaatatacttcaatcttcattatttgcttcattatcagtggttttcatactattgtttttcaaatttcttaaatataatggttctgaatacgtctcggaagattcagatttcttatctgattataatgatcatcattctttgaataaattaaatgcttatagaaatttcatctatctttggatacccatgatgtcattatttttagctaattcttatcttgctccattaagagttatatctttaatattcatatctcaattattaaataaatttaatgatatatattcaaatgattctttgaaattaaaggattataatgaatcaattttttcttcatcttatccaaattttcaaatttacattttattcattatttcacttgctttggatctatcaaatgatatttactcctcaaatgattattttacatctcatatattaggttatacctttatttcaattcctttcttcattaattcagttatgaaaaataaaaataaaaatggtgtctatttaggtatagcgtatattaattacaatattaaattgcatatcgttattataatattctcattattgaatatatcatatttttattttgaagattataattttaatatgtttgctgtatcaactggctcattgattattttaatttgtactcaatttgaaactaacagacctaataaacttagaattgattcagttttgagtgaattcatgaatagtaaacttattttacattactataaatcatattatatcatattaaattttattatcttatcaattttgttcttaaatgataatattggaccaaattttaatttgaaaaatgcttttgaaattttcatatctcaatattcaatttcaactcttataaatacatttttaatgattatggtctatatgggtaataaaaacataaatacaattataaatgatgatatattatctgataaaaaattagatcttaatgaaattaataatgatttaaaagaaaattcaggtttaccactcttaaatcttttcatacaattaattaattccaaggaatcaaaatctatattgaatttcttattattaaatttagcattcatgtttattcaattgttatattcattaagatcaaaatctttaagtttattaagtgattcacttcatatgttgttggattgtttatctcttttcttaggtttaatggcatctgttgttagtaaatataatttacaacatccaagtgaggcatatccttttggtttaggtagaattggtgcattatcaggctttactaatggtattttacttttagttattgttattggaatttataatgaatcaattcatagatttttaaatccaatgaaattagaaaatactactgaattgttaattgttagtacattaggatttttagttaatttggtaggtatatttgcatttaatcatggtcatgatcattctcatggacattctcatagtcattcatttggaggatctaatgatgactcaacacataatgaacacagtcacgaatgcaatgatgatcataagcatgaacataaacatgaacacaaagatgaacatagtcacgaacatagcaatgagcataataatgaacacactcatgaacacaatcatgaacatgctcacaaccaagaacatagtcatgaaacaaaatgtgaacacaatgatcacagtaatgaaaaacattcagattcacatgatgatgataatatgcatggaatctttttacatattatggctgatacactaggttcggttggagttattatatcgacaattatagttaaaataacgggatgggaattagttgatccaattacatcagttatgattgcaacacttatattaatgtcatcgataccattacttaaatcatcatcctcaaatttacttttattattaagtgatcaaaagaaacaaaaattatctcaattacttaatgaaattactaaaatatctggcgttaaaagctataaagtacaacaattttggccaaaggatggtaaagattctaaattaatcggttttattcatgttcaacattatcgaacagaaaatgcacttcaaattaggaaaaaaattgataatttaataaaacatagtaatatcattgatcaatgctttgttcagatggagaatgaggtggatgaatgttggtgtcgtagtgcagatgatgaaaagtatactgtattctaagtatttatataataacgtttatttataataatatacgttgttaatcgtttatattacaaccgttgtgagtatgttacgtaatatgcaaccgttatctccccttttctcgacgactttccatacatgtcctataaggtgatcccccataattcaactatatttttaatcgatgtatatcaatttattcagatttgagtaaataaaattaaattagtcgcttataaatgaaataaataaatgattatgtaagctaaaatatataagttgaaactatcttagcctttggattccttaatagattgttatagttgtatctctgagatagtaatatctttcgatgttctataaaggacttctcaacaaagctcttcactagacgtgtcaacgactagcggaatagggtatatttatatacttttgctttcgggcgtttcattccttacttgcatttcccttatctgcaatcccgaataaaccccgatatcttgtgtagttgggttattatctctccaattaatggttgcctgattcttcatgtgaaacataattacaccgaactgataattgaatcagccaatcgggttaaagagaccaaaactaattatccctatcattgctgatatcgggacaatcttggtcaaacatgtttcatgtatgcacccaacaattgatcatagttcgatagaaacttatggaaagagataagaccatataacactttcctatcacggaaaactaatcccgataaattgcgtaccgcaacatttgttaatcccaagatttccatgtagcgagtggtttcctcaattccagaacataaccgactttgtattacctaatcttaacacaccaccaaatgctgtaaggattggaacattgccagaaagaaacattgtaaataagaataacaaattaaattcaaatataaaatcaaatataaatcaaataatgcaaactaagttcgcgtacaagaaattatagaacaaaataaaataaaataaataaaaaataacagtaaacaataagttaatcaatatatattagtgtctttcatcctcttaataacagcaaatatgacagtgattcagtttagtaaaattcaaaatcgataataaacaattgctcttaaactaacttggttttaacaaaatatcagtaatcagtaattccgtgcatagtcacgggtataattcttaaattgcatatagctctagatgtgtctcactttagatgttccagtaaccatgatttttggtaagatattgttcattacttcagcagtgacaggcttggtcaaaatgtcagctaacatttcctttgtaccaatatgtttgtatacaatatgctcattttccataatgtctcttgcacgggccaccctaatacccatgtgcttagatctattactggtagtacccttttgtgccaagtatatagcagctgtgttatcaaccataactaataatggtcgaagacggcggtattcgttcatattaacggcaccacccacttttgtagctctactatactctgggataaaatattcttcttttctagagtactcaggaccaagcactcctaggaatgttaaaacttcacggtagtgggtcaatccattgccactctctaccattgccgccacctcggcatccgttgatgatgttgccatgaatttagctactctagtaaaccatgcaactggacctccattcatcatgaacacagcagataaagtcgatttcctcgataccggatctcccgcatgatcagcgtcggagtaggtgatcagtctatccgtatcctgaaccaaatctgataggtatcgagtatacctaatcatgtaactacgagtttgatacacatacctgacaattctaagaagttcccttttaagttttggatgtggacataagcaatatctagccatatagttggctgcataagtaatatccggtctcaccgttaatgatatgtactgtaatgcaccaacaacttctctaaagaaatggatttcgtcagctaattctttaccagataattccattggttcttccttttctagatcaaaatgaaaaccaggtgtcattggtgtagaaatgaatctttgggagctaaattcttccttcattcctagattctccaccaatttagtgatataactctccaaacttaattccatcgagagtaaagtaccactcctcttgtccctgttttctctgactccaataccaagaatatctttgaaacctaatttattagcatatgtctttcttaaagtaaacctattgtttatcttatatagaaaattatcaacctcattttgagatgtccctgaaacaatcatgtcatcgacgaaaaatcccacgatgatggatatcttatctttccttttcttttgaggtttgacgagaacacaaggaatatccccacgttcttcaaatcctattgatatcaaaaacttaactaacgttttataccataagaatcctgattgtttcagtccatatactgcttttcttactcgatgcaccaccttctcaccatggtttaatttaacattactttcctccaggtgtttaggtagctcgacgtatacttcgcagtcaatctctgcgttcaaatatgctgttgatatatctaccatttctatgtatctattgctttgtaccgactccgctataatcattcttagcatgtcataaggtaaggttggactgtaagtttctttataggtagacttatcctgtttatcacctctcataacaaatctcactttcttcttagcttctccccccatatctgcaggtctcttttcagagcatactatttgcatactcacagttctctgtagtatataagggtcactagttataataggttctacatcccaagagtgttttgtcatttgagactctaattcgtcatcatgtgctgctctccaggcaggtccttcaactggatcatgacaaacaacttggtatatgattcgatttgggcccgggtcctcccttggtaacttgctgatattggcaacggtcatgattccgttgacggacttcattgaaaacttgctacggagtaatcttccttcaggtagctttattgtttcatgcggtttgtccgaatcaagcaaggttctgtcgacttcatattcaacaatattgttttcattcaattcaagcgttttatgtaaatcgtcctctctgacggattgttcgaactcttctctgcgctttaaatcttcggtggtaaattgttctacttcaatgtcatcgaccttttctgtcgtctcttcattggctagtgatgtagtggagttttcctgatcattaagttcagttctgccagacatttcgttggatatatctttatcaatgattgtctcgtcagactcgtttctggtaggattttctgctacatttacagtatgggtgatatcagatgtttgttctttattatcatttgcacttgcttcgatattgtcgtcatccttatctttggtttcttcaacaatattattatctttgtcttctgtcatttctacgtcttcatcactagtgtcatttttctttccactatcattgatgtcagtagtaacactatctccccccatattcaatggaatgtctgcttccttaactgtaacttcttttggtaccatatgatctttgtttcctaccacgacacactcactgtccttaggtgtacttaattctgggtttatcttgttagtttcataaacatagtattttggtaacactggaaaatcaatttcttctttgcccaaatctgcttctgccatagttttgccatacttatcagtgaaatctacttcagtttcttttactgaagctctcttcataccaaagttttccaatgaaatctccttaaataacctaacaggtttattatacttcacatttcttgtgtgttttattgtggcatggtataatccatccttaagtttttcatacactaggatcttatcaccacctaaaactggtgcctcatctgcacaaggatactccgaaggaccaagataaaaacagtgatgtgcacgcatctctaatcctgataccttcttagaagcatctagccagattccatatctgccaaaacttttaaacacatgtgggatgaactgctttctacctgtaccagggaaataatgttccattatcatttgttcaggagatttatctttattcttaggaattaacttatttctaatcattgaagagtattccattacgtctggccagaatctattatctatacctgattctaccaaattggttctcatatcgttcctaatggttctattaaatctttcagctaaaccattctccatggatgcgtaaccattggttgtgatgtgagtaataccattgcttctgtagtattctttcagactattactttggtattctctccccatatcggtgtgaaaataggagatatcagccttaaacttattctttatataggcacaatatttgcggaatgaaggttcaacttcagacttatcttttaagtaaaaacaaacattaaattttgtataattacacaaaaaagtgactatataacgtaacgctgaacctgccacacttccaccttttgaatacttgaaactcaaaacaagtagatcactatgaactaaataaaagggagtctccatcatatacttatctcttgaacctttaacgtgattacacctagtagcttttgccattgcacatgaaatacatgtgaatttctcatttagaattctttcatctttatctaatactatattattattatccatacttttcttaatggtgtcaatatctgcatgaccacctgcttcatgtattcctgcgactacctcattccctttttgatgctttattagtaagccatctggaatcataggtgtaccttgaacacggtataactgagccttgccatcttgccaaatcaaattcggttcaccatcaattgacctataatcaaccttgaacttaatcaaatccttttcactaacataagtacctttaatatttggacaaaataccattggaacactgacaaccttcttgataccatcattaattaatcctaaattcaaataaccaccaccttcaataaccaattcatcttcagtaacagattgtatagtatgaaaatcaccttcaatttcttcataatcatctaataatgttttatctcctgtgacagagatctgagcacctgtatccaaaacaatagaagtgtagttagattcagccttgatgcctcgcaacctcgaggtctttatcattaatattggactccttctctgccatcatgatctccaagatagatctagcttctacatcatttaaaatagcattgactttgaatttctttctttcattactgatgacaggacatctattcataaaatgatttgaatcaccacacttccaacaaccaacatcatatcttctatcacaatcccttggatcatgattagcaccacaaatgacacagtgtcttggatttcttcttcttcttacatttcttccaccattgttattaccattaccattatcatttgagttgccattaacaggataattgttattaatgttgttattcatttgattattgttaccaccgtttgatctcatatttgttcttctaccattatttcttgcattgtttctaactgaagatcttctggtatcatttctgacattgttgtttctatttgaattagcattgaaaataccattaacattaccattaccattaccattaccattgacattgccatttccaattgaaataccattgactcttcttctagtaatttctttcaagacattatcttttgatctaatgttggttaatgattttaacttgttgtaaacagcatcaatgactaaaggaatgtcattcttttcttcattaatgaacttttcaataatttccaaaatgtcttgacagttgtaatcaatatcaaaattaacagctaagtgagcacaaagttgtttgttaggcatctcatatttggaaagcttcataattaaagataactcttcccattgattaagagtttggaatctatcattagttaagttgaatctgtattctctaattcttagcatacattcctgaacatccaaaattaaaccacaagcatttaaaatctcatgtaacatggtttgagcatgatcatttgtgtttttaccaaactcaccaattttaacagtttttgcaaataattgtttaataactgcttcatgatcttctttgatacctaatttgacaccgactagagtagcatcaaccattctgtttaagatgttgttgaatccaattcttgaacaattgttattaatgtcgaaccaccatctgttgaagtcatcttttgaattgagtgtttcgaatgattggtttgttttaagaaattctttgaacaccttgttgatttcagatgatgctggtttactccagttttgttctgcatcatccataataatatctccatcctcatcttgtaaagatctcttggttttggttggttttgctttaggaatcttaccaagtttggtaagtgtcttctttaaagacttggttctagttttcttgttgtttggttctaaagcaggagtggatgattttgatgttgaagctgatgatgattttggagttgttgctgatgatgatgatgatgatgatgatgatgatgatgatgatgatgatgatgatggggtgacaacatttgtattggtgactgctggggtaacagttgaattgattgctgaagaagttgctggagtggttgctgggatggttgctgaagtaattgatgaagtagttgctggagctgatggagtaattgctggagcaactgatgaagtagctgttggagtaactgatgaagtagctgctgatgatgtgacttctgatgaagctggtgaagttgttgctgataatggagcttctggtgaagctggtgaagttgttgctggtaatggagcttctggtgaagctggtgaagttgttgctgctgaggtagttgctgataagtctaattgaacttgttcattgttttcatttgcgacattatcattggtgttgttggtagtattaccttcgttgttattattctctgagtgaccgagaaccatattcagatttgagtaaataaaattaaattagtcgcttataaatgaaataaataaatgattatgtaagctaaaatatataagttgaaactatcttagcctttggattccttaatagattgttatagttgtatctctgagatagtaatatctttcgatgttctataaaggacttctcaacaaagctcttcactagacgtgtcaacgactagcggaatagggtatatttatatacttttgctttcgggcgtttcattccttacttgcatttcccttatctgcaatcccgaataaaccccgatatcttgtgtagttgggttattatctctccaattaatggttgcctgattcttcatgtgaaacataattacaccgaactgataattgaatcagccaatcgggttaaagagaccaaaactaattatccctatcattgctgatatcgggacaatcttggtcaaacatgtttcatgtatgcacccaacaattgatcatagttcgatagaaacttatggaaagagataagaccatataacactttcctatcacggaaaactaatcccgataaattgcgtaccgcaacatttgttaatcccaagatttccatgtagcgagtggtttcctcaattccagaacataaccgactttgtattacctaatcttaacacaattaaaacaagggctcaatctttgaagtttggaactaacagtccgatatctttttcttgatatcatttggtcacccctggtttttaaagacattgtacatattataaaatatggcatcaactaaatttataattttacagttagttggattattattagctatttcaattgctgttttccaacctacggctgttaatatctcacctttatttagtaatgagtcaaaatgtccagttcctgaatatgttggtacttttgatcataacgatactcaatttctattacatgataaatcatttagaaaatttgctgctgaaagattatctcgtgcaattcaaattgatacagttgttgatgaacatatgactgatttttcaaaattcattgactttcataactacctccgaactgaattcccattagtttatcaaaatgctatagtcactaaaatcaataattatggtttagtttatgagtttaaaggtactgattcatcattaaaaccaatattaatgatggcacatcaagatactgttccatttggtgatttaagtgaatgggaatatcatccattaagtggtcattttgatgatgaaattatttatggtagaggatctaatgatattaaaggtttattggttggtttaatgggtgcaatgactgaaatttatcaaaaaaatccaaatcataaacttaatagaactgttatatttgcatttggttatgatgaagagattagtggtgatttaggtgctaaaaatattgcaaattatctttttgagaaatatggtcctgattcaattgatcatattttagatgaaggtgctccaatgtgtattggagttaataagaactattatggatttgttgttacagctgagaaaggttatttggatttagcaattgaagttaatgcgccaagtggacattcatcaaatccaactgataaaacatcaattggtttattatctgaaattttaagttcatatgaaaaggataaatttaaaccaataattccggatgaaaatccaatgctaaatctttttgaatgtgtttctgagcagagtaagttgccatttttttataaacttattacaaaactttcaagagcaaatgaattagcaaagaatctactaattaataaattagcaaatgtttcattattcgaatatacaattagaactagtcaagcaattgatgttatttctggtggtacgaaatacaatgcacttccttataatgcaactgctgtcattaatcatagaattgcagttggtgataatgaagatacagttttatcaaaggcagttaagcattctaaaactgttgcaattgaatcaaatttaggactattagttaatgataaagttttaattgaaccaactaaaaatggtgtaattaaaattagaacattatattatttaccggttgcacctattacaccaatttttgatgatatttggaatagattaaccggttttatgagaaatttctatgaaagggaagttttccctgggaagtttattgatacaccttatattataacaccaactacaatgcaaggtaatacagatactagacattattggaaattaagtacacatatttacagatctcaacctggtataactaatttatttgaagctcatatgcatggtactaacgaatatgttcatattgattcacacttacaagttattgcattttactataactatattttaaacatttgctaatccttatatttactttcttaaacctgacttttaggttttatatttaatatttagaaataaaataattgttttaatataaaaaaatgtgactttagtttacctttacgtatcaaaagagataagtaagttttacaagctgttgaaagtaaattatgtaatactagttgattatatatggaaaaattataaagaaagctaatgaaaaattgaagcagaaacttaaagaaaaaacaaaagtgtacattatccgatggaaattcatggatgtagagacgagtatcggaaatcggatgtcatcattgtaacaagatacaatattatgaatagaacgaggttaattatgtttgtggttaatttgaatcaaagaacttgttgtgttggcttaatcaaataaataaaagcattaatccaacaaaattaccaataaaacttggtttagttatagcagcatctccttcatatccttgaagagtaaaactatatccatttggtgacactgatgtggaaatagagattgtgcctgaaactgtgcctgaaactgtgcttgaaactgtgcctgaaactgtgcttgaaactgtgcctgaaactgtgcctgaaactgtgcctgaaactgtgcctgaaactgtgcctgaaactgtgcctgtagtattatttataccataaacttgttctgtggctgccaatgctgaattagttgcagtacttgttgatgatggttggtttggtaaattggatatggtttcagttgttaaagttgataatgttatctcctctgatgtatttggcaaaccagttgtctcaactgagctcaatgttggtgttatatcaaatggtacaatggtttcatcggtagctgttgtaataattgtaaaagatatggaattactgagagaagctgtacgtgtgtttataattggattatttgctgattcaattattgtggtagtttgtgaaataggaattaagttggtagttgaaatgacttcctgggtggtgattgttaatgatgatgatgatgaagataacaacaataaactgtttgatgtacttgaaatgacggatgatggggaagctagtggttgagtttctatagttgagctactagatgaagtatctgttgctgatgaaaaatttgaggtttcagtaactaaactactagatgataaagtacttgatgtttctgcagctaaactgttagatgatgaagtacttggggattcagtagctaaactgttagataatgaagtgcttgatgttgctgtagttggactactggatagagtaactgttgctgataaagtacttggtgttgttgtagctgatctgttgaatgatgaggatgacgatgaacttgagcttgaagtagatgaactacttgaagataatgaacttgaacttgaagtaaatgaactactagatgataatgaacttgaacttgaagtaaatgaactactagatgataatggtgaggaagatgatgacgaatatgagcttgaagtagatagactactaaatgatgtgactgttgtggatggagtgcttggtgttgctatactactggatggtgaagtacttggtgttgctgtagttgaacttttggatgaggatgaggatgaagttaagcttaagcttgagcttggagtagatgtagatgatgaggatgaggtaccagatgaaatagatgaactactagatgatgatgtggatgatgtggatgtagatgagctactggatgaagtagatgaactactagatgatgatgtggataaagtaccaaatgaactactagatgatgatgtggatgatgtggatgtagatgaactaccagatgaagtagatgaactaccagatgatgatgtggatgaagtaccaggtgaactactagatgaagatgatgatgtggatgatgtggatgtagatgaactaccagatgaagtagatgaactactagatgatgatgtggataaagtaccaaatgaactactagatgatgatgtggatgatgtggatgtagatgaactaccagatgaagtagatgaactaccagatgaagtagatgaactaccagatgatggtgatgatgtggatgatgtaaatgtagatgagctactggatgaagtagatgaactactagatgatgatgtggatgaagtaccaggtgaactaccagatgatggtgatgatgatttggatgatgtaccagacgaagtagatgaactaccagatgatggtaatgaagttgagcttgagcttgagcttgagcttagagtagatgtagatgtagatgtagatgtagatgaactactagatgatgatgatgatgatgatgatgatgatgatgatgatgatgatgatgtggatgatgatgatgatgatgatgatgatgatgatgatgatgatgatgatgatgatgatgatgatgatgatgatgatgatgatgatgatgatgatgatgatgaatcaatagatgatgtggtggatgaggttggtgttatacttgtggatgaactacttgattttgatgttgttgttggtgctggacaagtgatatcaggttgatcagtgttggtgatggtgtattctgagttgttgatggtggtggttgatgttcctgtgataaatgatccactgacttttccatcggtgaagtaacatgagaaagtgtaggcagtgacattaggagcgactgaggtaggagatggttcacatgttgcatcataggtggtatcacatgaagtaacggcagttggataggctggtggtggtggaggtggtggtgttggacaggttataactggagaatttgtattggttattgtgtatttaaagggccaatttcctttgacagtagttgaagttgtaaaataaccgttaatatcatctgtaaaataacatgaggtagttttaacatcgtaattgtagtattggtaaggatagtctgttgtacatgttgcaacatactctttctcacaagaagtaacagtagttactattctatgtggccaataattatcgtgattggcattaattccaatcacaccaaatgttagacaaaaaataacaaatgaaagtatattcatattacaatgcaataataaatttaattgtttgttgatgaataaaacaaatatcaaaaataatgtgaagtattaaaaaactatcattgaagtatcataagataaaaaaaggagaacatgggtatctttttaaatggaactattttaaactaaaccaaattcaaataaaatgaatccaaagatactgaaattgagtgaaataaaatggggaaatgatgaagtatggcataataccgaatcctaataacttgtcgaagggtgaaatggtttgggtttaaattcagattaagctttagattaagaatcacatttatcggactactgcaaataaaaaattattctagaaaacattaaaatcaacaaaattaacacaatagcaaaattcaatcaaattgccgaaataggaaatacgctaacctaaaacagaattttagaaaaatttgacggctcattgataattatttaatgttacattacatactgcttttttgaaaattgattttattacgtatttagcggcggctcatttttttattagtgaaaagggagaaaatttaagaaaactttgtctaatatttgttaatttgaatgctccgcattaattggtctggctatattttgttaaataatttacgaatgattgaaattagttccatttatttcacttttattaattttttaattttattttttctacaacagtaaatttcagaatgattattaaatagttggataatagattaaaataattagataaatcgtatcatttccatgaaacttataatttcctgaatataatattttatatgactcttcacacatttaggtacaataaattattccattatgtaaaaatgataatggaaaacaatttgtaaaatcaatataaaacagttaaagaccttttttaacaaaaaaacggttatgatttcgcccttcctatataaatttcattcattgtttaagtatctcgatggataaagagaaagaaattctcggtaattagttttttcgctcgtttttatccttttcgcccttttttcatgtacctatccttccctcgcatattttttttaacttgtctttccattaataaagatggaaattattaatactacattgaaaataacagggcgatgacattttataataagtcccacatttaattgattttccaaaattatttcattattttcgtttaatggaaatattttgaccttgatacagctttcaattctagacttattggtttttaagataattataccaatagttgttactattatttattaatattaatattatacctcaatgcgttaatgagccgtttatgctcttcttgatatgaggaaaggcttaaataattaaatatttgtattatttatttacataatattttcattggaaatcaacgggataaagtcttttaaaaaaaaacttgaattcttagtgttagtttttcaatctttaaagtatttagtatacataataatggtttgcataatggtttgcataatggtttacgttaaagaatttatagatctcaaaattcaaatattttaacatacctaaaaattaatgtttcattgaatctgaaaatcgcaaaaaggtaatgtcatctgtcaaaataaacttattgtataaacttatctagtatttattgtcatttttttatttatgtgggtttgggggtttttttttcaacttctaaattttcttctacaataaacgatctacacattcttatatgatatttatagacatagcagctacttatttgagaataaaatacttttataatactttggataaaacagcagattgaatataaagacaaaattttatttatataatttacctctatttgaaaactactataagacattatacctttaattgacccacaattacctcatcttgagatgcaacgctttctaatttatcttaaacgaatatctatcttatcgtacttacccccaccactcaccgcggaacgaaaaataaatttaccctccaaaatcctacaggggattttattcttgttagaataagagctacttacggatattgaattgagttactaccttcttctccttagacatatctactaagatctctacatctacatagttattaccctcgtcgagttatgtcccagtagccaaccaccagacactcgacgaccaatcctacaatagtcgtatcgacctcttgttcacctgagcctccagctcatcggtattgtaatcccgtcatatctcgggtaccattcctaatcaggtaataccggttgctagtcccttcccactcgtgtactggactatcgaccctaagtattaccctattaggtatggcccgagattcaggtatggttaattctagcaattctcgtctaatttaactattaatttactgaatcgagtaatgtactaatttttttttatttttatatttaaatagatggtatcaattaatttacatatggataaaaaaatattataaagagagaataaacgaatgaaaggaggtgaaacatcgaaattaagtaagtaatactttgttgatagaaatccaagtgagtattgttaatgaatatccgaaatcagatatcatttttgcaattaaaatttaacatgaaaaaatatgaaatacatttttgttcctttaattaaataaatagtaataataaaccgacaaaattaccaaaaatagttggtttgataatacctgccataccttcgtattgttgaagtgtagaattagtttcaaatggtggaactgatgtagagaatgagattgttggattagttttactattagtactagtactgatagtaatagtggtataattattttcctcagtgatactagttgataaagttgaaatagttgtagtagttgctaactttatactttctgaagtatttgtagtagtttttatttcagtttcagaacttgcactggttaaataacttatttctaatgtagtggtatctgatgaaactaaattatttgtagttgctgatgttgtagtttgttcagagacatttgtagttaaaactgatgtaatgatggaattactgagagaagctgatgtggtacatggaacagttgtagttgtagttgtatcaatttgtttagtagcaaatgaattagtggttgagccaatatggaatgacaatgaacctacagatgaaccaatactaaatgataagactcctgtagaagtggttgatgatttagtacttggagttaaattggtggtagatgaaataaattcagatgatgaaccagaaatggatgagttaatagaggatgatgatgttgttgttgttgttgttgataatgatgatgatgatgatgatgatgatgatgatgatgatgatgatgatgatgatgatgatgatgatgatgatgatgatgatgatgatgatgatgatgatgatgatgatgatgatgatgatgataatgatgatgatgatgatgatgatgatgatgatgatgatgatgatgatgatgaatcaatagatgatgtggtggatgaggttggtgttatacttgtggatgaaacactgcggtattgtgataagaatgaggatgaagatgaacttaaagatgttgataaagttgatgatggtacaacaggtactgatgaaacatgcttaggggataatgatgatgtatagtatgtctttgaggacttactataaaccattgaggatttggtggaagtacttgtggtacttgaagctaatgagattgatgatgaagtggaaaatgttgataaagtagatgaggtggatgataaaaatgtagatgagctagatgagcttgataagcttgatgaacttgatgaacttgatgaacttgatgtggataaagttgatgagcttgatgagcttgatgagcttgatgagcttgatgagcttgatgaacttaaggttgatgaacttaaggttgatgaacttaaggttgatgaagtagataaacttaaggttgataaacttaaggttgatgaagtagataaacttaaggttgataaacttaaggttgatgaagtggatgaacttaaggttgataaacttaaggttgatgaagtggatgaacttaaggttgatgaagtggatgaacttaaggttgatgaagtggatgaacttaaggttgatgaagtggatgaacttaaggttgataaacttaaggttgatgaagtggatgaacttaaggttgatgaagtggatgaacttaaggttgataaacttaaggttgatgaagtagatgaacttaaggttgatgaacttaaggttgataaacttaaggttgatgaagtggatgaacttaaggttgatgaagtagataaacttaaggttgatgaagtagatgaacttaaggttgatgaagtagatgaacttaaggttgatgaacttaaggttgataaacttaaggttgataaagtggatgattcgcaagaagtactagtggttgagatagttgaagtggtagatgatgtagataatgaggatgatgttgaagttgatgttaatgatgtatttgattctggacaagttaagactggtttatcagtgttagtaatagtataacttcttctaaaaatactggtaactgttgtatctgtagtgaatgaaccagcagcatcaggatcagtaaatgaacatgagacagtatatgctgaaatgcctgaagcaacaaacgttggagatggaatacatgttgcaccatatgcactattacatgatgaaacagtagttgaatgtgctgatggtggtggcgctggacagcaaatatctggtataatgtagttggttatagtgtatcctgtttcacaaatagtagtagtagtcaaacttttcttaaatttaccatgaataggatcatcaaaagtacatgagtatgcatatattgtttcatctctaatatttgttggaattggatcacatgttgcaacaaaggatgattcacatgaatggacagtggtaatataaggtgtaggttgtgtttctgttgatgttaatgttgaggatgaacttgtagtagttaatggtgttggtggttctcttttatcaatacaaatgactggaaaatcaccttgaacatcagggcctgtacctctcttaaaaagataatcaacacttgtaacatcaattgcaccataagcaaattctatttgaatttgtttaccttcagacatacaaccatcttcacctgctctaaaaatgaattctgaagaccaagaactaccatcaataagaacttgtggaatatcatgagtatcatgaatatataattgttcatcaaataaaagggcaatttttgtaacttcttgaaaatattctggatgttttgcttgaaaatgaatgatacctctatataaactttcaccaactggataaacttcgtcaccataagaaattgaagcatataaatgttctggggcatgaccatttggagattgaacaaatggagcaggtgttgctttgagaggtaaaccatcaactacgttagtgacagtagttgtccattgaactcgatttggattagcattaacattagcaacaccaaaggtaagacaaaaaataataaaagagtatacgttcattgttaaataatgtaggtaatactatttgagtttttatttgtttgatgaacaagtatttaaaataatttttgaaacaagtattaaattatcatcaaaagttaaggaattattcaccctttttaaatcaaactatttgaataaattgggtatttactttgtaatagaattgtcaaaatttccgaaaattaacttggaatttgtttaataggaattacaatcaaaataataaattagctttgcatgaaatatggtagagtggaaattcgtttccactatattataatgattattcaaaccaaataaaagtctagaaaaggggtacagtatctacatttctaatcaacataaaaacctaaaatagaaaatagaaaatataatattaaacataattggaaattattatttatgttcccccgcatgaaccaatgagaaaatatgcaagtttggcgatactgtgcgaagaaagaataatttaccaaaatgtaacgtttttcgtttctaataaataattttctttattattattaatattattattaaatatttcatattattcgtatgtgggatcattcccgtttaattattttaaaaattgtaccgttacttcggtaactaaactaaggggaaatcttctagcagttacattataacagatatttcatatctctatgtaacctattattgggatataaatttctcatatttgaatgtattagaacaaattgttgaatctaatcttttatgaaaactaggcttattaattcaatattatactaaaaaatttaagtgtctgattggatagtgccgattgtttattattgttactattattattattaataatcaaataatacagttataataataataaaaaaagggcttagacccaattgttactaaataatatatttatgaaagacatcatcgtaagataacaattaataatatcaacaataaataataatattattactaaataaaaataataataacaatacgcccgtacatattaaaaacgttttaaacggtgcacaaaccgttcaaacggtaatttccaaatctccccgatctgcttggttttctcgttttctcgttttctcggtaattaaaatgaaaaaatgggaaattgaagtattgtataatttcttaccccatacttagtcctctgcgcgtttcaacttaaagaccgtgtttgttatattaagatggaaattactgatatcgatatccatcataatcattatgtttctaggtaaatatctttcaatacaatattttgcatcctcagtataatttcacatgaataggttataagatattctaaccgaaattactatttaataataatttaatttaataataaaattaaaattaaaaaatatgaactcatattttttaataaacaatttaacttgacttaggttaaataatttttgtttttacttttattacctaataatatatacacagtttcgcatatattaaggtttgtaataataattacacgaaataggtacaaactgtttacctattctccacggtgtttacaccaaaaaaaattcctaattattatacgggcgtgtttgtttatctttaaattcaaatttcaaaacctaaattttaaattttaaatttttgtaatcgtaaaattgctatactatatttacatattcaaataaatactataaacaatgaaatataatatacgatgtttaccaaaattttgaaaagattggttgctatgttaataatatacagactataataaacaagttattaatctaaaacatcgagataactctgctccatggatataataatctctactccgtgaaatatactattagctaatcatctcaataatagttacgtaatgaaataaaatataattacttacgtaattgcatatttatttctcacttcatgaaaataatgattttctaaattgacaatgctacagagagagacggtatattgagggcaaaagatacagtgttttattattattatcatttataaattaacaaataacaatgcagaaagttataccaactacagaatatgctaatgaagtacgtaatgaaccaattgaacatcgttttaatccatattcagataatggtggtacgatattaggtattgcaggtgaagattttgcagttttagcaggtgatacaagacaaacaactggatatagtattaattcaagatatgaaccaaaagttttcaatgttggagataatttattattaagtgcaaatggttttgcaggtgatgcaaatcaattagttaaagtatttgaaaataaattaaaatggtatcattttaatcataataaaaatttgaaaacttcaagtgcagctagattaatacagcatatgttatatggtaaaagatttttcccatattatgttcatacaattttagcaggtttagatgatgaaggtaaaggatgtatttattcatttgatccagttggttcatatgaaagggaacaatgtagagctggtggtgcagctgcttcattaattatgccatttttagataatcaagttaattttaaaaatcaaatggatccaaattctaatggtaaaaaaccaaaggaaattagatatttaaaattagaggaagttattcaattagttagagatgcattttcttctgcaactgaaagacatattgaagttggtgatggtttagaaattttaattgttacaaaagatggtgtacgtactgaatattatccattaaagagagattaattgtgtatcatttttataatgtctttattaatatccatctatctatctacctttctaaatttataataaaataaataaatgaaactatttaattgataaaaaatataagccagtctttataaggaagtgaattattgtttcttttcaaattttttatattttgtcttctttttggattgaataattttaacaatttaatatcattcttgaaaattgatgaaatcagtgattttcactttttaggtggctcaactgataatctttgacaaagtttttttcctttatatgcttaaaatacttattcttttgctataaatactcaatacagtaattgaacatagaaaaattaatatatctttcaagctatcaacttagaatgacatttaaatcatgttaaaacaagagattattaacatttgaagagtcttttatgacagaagaagctgttgtgatactaacatgaattttttctaactcgcttagtaacataacacgtaacacgtaaagaatagagattaagaatataagaatgaatatatattgggatctaattcaattatataatggtataattatgttataaaagagttatattatataggatataataatctattgaggtaattttaaaccatttttaataactttattataataaatgtaaaagaaatcagaatagactaaagtttgaattataccagcagatactgaaattatatcaaatctttcctcataataatatctataaatccaatttggtatatataaagctctgtataaacctaaagcgaaaatataatgaattgttaataaatcaccttcaccttgattttgtaacataaataattgaggtaaaatacaaacagattcaagccataatgagaaagaccaacaaatttctaaaattgtaaatttataattaaaaattaaagataatataaagcaaggtattaaaatataagaaatttggaaatcatcaacatattgagttatttgctttgtatattttttaataatataaattgaataaaaagttgtaccaataaagataattttcaataaagtattataaagggaacctgagaaatcaaaagttaataaatttaaatatcttgtaataaatactaaagcatataaaatttgagttttcaatgagatacttttagcagattttttagtttcaacagagtgaataagtataagaatggaaacaagatgagccaaatcacctgagaatctaaagatattaggcattgggtggtgtttatggatagtataagatacaatttcaaaagaaagatatgataatagtctcctaataataataaatttatacaaacaagtgtcaactaaaataaaaataaaaagcacaaaacagacgcgactgtccatatgaaataaaattaaaattagaattagaataaccttaatggtagaaaatagaatcaataaatagatctattgtattactaagagtttctcagtttatgttatatccgggggagttgactaatttattggtttattatttaagttattcacttttgccacccttttcttgtgtctttcttatttgtttctttccttttatcaactcaattagttatcaattaaattatggttaaagcagtcgcagttttaagaggtgattcaactgttaaaggtacagttttatttgaacaagcttcaccttctgatgaaatttcaatctcttgggaaattgaaggtaatgatgcagattctttaagaggtttccatattcatcaatttggtgataatactaatggttgtacctctgctggtccacattttaatccatttggtaaaactcatggtgctccagaggatgaaaatagacatgtcggtgatttaggtaatattaaaactgattcaaatggtttagcaaaaggaaccaaaactgataaattagttactcttttcggtgaaaattcaattttaggtagaactgttgtcgttcatggtggtcaagatgatttaggtaaaggtggtcatgcagattcacttaaaactggtaatgctggtggtagacctgcttgtggtgttatcggtttctcagcttaatttatattataatttataattaataattataactaatattatattatataaatgctataaactatttaatggatgtacacaccttatttatttatttacattagtaactcactatatatcatcaccaccacctccaaacattaaaaatcctggtcctccactatgtctactaaaataatcaaaatcaattgaaactgcattacttaataaaactgccctttcatcaaatgataaaccatctctattaatttcaccatatgatgattcaccattagggaaactattaccatccattcttaaaatataaacaccagtatctgttaatgcttccctaaataaaccaccaaaatttctactaacttcacctgtaattaacccatttttatcatataatgggaattcccatcttaaaaatcctgaatcaattttagcaaattgaattagttcattatcttcatattgattattattattattatctaatttaaataaattataccttctacgccataaatgccaactttgaacactttcaccaatcattgtttccatatcaggtaaataacttttaatatgagaatttataaaactaaaaggtctatcaattgtcattaataaattaccttcaagatcaattaaatcaactttaaaaggtctatgtaatctataaatttgtcttaaaattaatttccaaaatccaaaatctctttcaattaaccaagcaatttgttgtccactttcattataaactgcatatttatttgattgttcaaatcccaggaataaattcatatattcaatctttctctcaattattaatgttgagtttcttaaaatattactcactggatgataatttttaataattgaatttttatcattaattgaagtttcaattatcggattgatcagattaataggatttaattgattaggttgtattctatacagagatcgacgtgcattgttaattgaagttgttgtaaatctacgcattttaataaatctggtgattaaagaggccactgcagtagagaattaatgctttattatatagcgaaatcttatattatgttcataacatgaattttttcaaatttttcaacatgaatttattaagtcgttgaattaacaatttatatcataccttcttttaggcaatgagtcgtttatttactagaggtatccatttagcaccaagattagcacttgagaaatctttttcacaaaatggtattaaaggattaatgagtccagaacaatttcgtttaggttggattgaatatcaagattttcttacaaaacaattaagtatgaaaactgttgatacaacatatgagaatagatctcctatggcaattgcaatgagttgttcaaagaaaaatcaagaagctgatattttccattatgcatcacaagctcataataatcatttattttatcaacaattaaagaataaggatgattcaattaataatattgaaaatattattaaaccacaattacttaataatattaagaatactttcatttcattagaaaattttaaaaatacaattcttggtgaagcagatattttaagtggaaatggatggatatttttgattgaaaatgaaaataaagaattaaaaattgttaaatgtaataatgatggtacaccatatttttatggtaaaaatcaaagtattgaccttaatacaacatttgattatcaagaatatgcaaatattgaaaaatatggtgaaaaaattaagaatggtgtaaaagattattcattaccattattatgtattaatgtttgggaacattcatatttattagattatggagtttcaggtaagggagaatatttagaaaatttatgggattgtattgattggaaagttattaattcaagagttttctcaaatatggagagttaaagtagaagttgtttatttatatagtacaaattattatatacattttattccttgttatatagtagataattattacaatctaataaaatttgtaaaagttgattatcatcagaaacattagttacattaattgaattaattaaatcaattataaattgtgataacattaaattttttgaaattaatttatcaggtaatgaatttataattattggatttggtgatggtatattaatatgattaacattatctattattggagtaatgatttcattatcaatattattatcatcttctgttgataatgatatacctgaatttaatgaatttctaatattaattaaatttaataaagtattttgtaatgaagataaatcatcaaataaattaatatttaaacctaatttttcaagtttttcattaattatattatctaattgatcatttgtataatttttatattttaaatttgtttgataacgtagtttatcaagtaatgctttttccattagtaaataaaaggaattgtaataaaagacgagggatgtattaggttatggtaatctattttttttacacaacaccctctttttatcaatatggagtttaaatttcctaaaatacatgatttcccaccattttatactaaacaaccacatgaaggtacatataaggcacaaatagaacaatggattaatataattttaaaatattgtgaatttaaacatatttggaaacttgaattaaatgaaagtaatggaaattatcaagaaattttcaataataaaaaaattgaacgtaaaataaatgataatttattacaagatattataaatgaaatgattaaattagagtattgtaaatatattaataagggagattttaaaaatatattaatttattggaaaaatataaatgaatggagtttaaaattaattgaatggattaataaaagtggacaaaatggtagtattttaacagtttatgaaattcaaaataattggccaaatgaagaattttatggtattgatgatgaaattatttataaagtattagaaaaattagagaaggataaaaaagttgcatgtattagagagaataatgaaattgttggtattaaagtgtaatgtatataggtattattagattatataagactaagataagaatcttcttttaaataattgattaaaagtatgattatgaggacgattaatacgtttttcatataaataataagcagatacacccattgtaatagcggcaataggatcaatccaatgagatataagtggaggatatttattaaacatttgggtgtatggggtgtgacttaaaaagaggaagtaagtattgatcttagagtctttaagagtagactttgagtagactttgtgaagtattgagagttagcgaatagtgaagtagttaacagttttaagtgaagagtttttcacttaataatttatattgtatagtcttttgatcaatctcatctagtgcatctatggcagtaaatatctcatctttattgacgttttctctgagacgtttggactttctggcatctgtccatttgttaatggcatttttttgaaatgtatccataataattccaaaaaccatagttgcacaggttgggttaaaatataataacatctttgcataatctaaaagaacgtgatattcaactgttgacttcttattcaggactttattaattaaaattgaattatcttctgcagagataattgcccattttttgttcattttcataagaaatgataaaccatttggagtacttctcattaggtttctagagaagaataattcaactgctgttgccataatagtatcaatttgaccaaaatccgtaccaacttgtttgtttgtacagaataacaaatttttccatttttttcttgaatggtagaagagtacattcgtatatgtacctcaggaagctatctcagcatttacttccttttgagttttaattattacttgaattggtgataaatccgacatatattcattttgagctatcgagactgtaaatcttttaaaatgtacactgagttcggatactctatataataaaaagactatatagaatataagcagtagctaacaaaaagactttgagtagagattaatttttcacgtattatagatttatagtatacgacaattttctttcttctttaagtaagtaagctatactatgaataaagatataatactagataataataataataataataataataataataataaaagaaatgatttaatgaatatattaccagttaatataaataagaatggtataattacaggtgttaagggtaaaactgaggaaaccttaagaggtagaggattagagagtaaaaaaattgagaaagttaaatttattacagttgataataataaaggggatataatatacagtggtgatattaagataagtaatcatagtagtaataatagtattaaagaggatggaccagttgagagatcagttgaatggagtgaaatatgtaaagttttaagttgttagttagttattagtagttgttaagtgtattataagttaaatgatattattattacataatcaaacattataacagacgcgtctataataaataataatatcacgtgaccattacataattaaattaacattacgtaatacttggtattttaaaattcacatgttaatctctcaaaattatttatttttttgattttatttgatttgattaatggttaatgatttgatgatttgattttcatttagtttaatattcatttaccatctgcaatgtcttattctaatgagactcgccccatccgtagaatggtagatgattcttatgatgaatctcttgatccggattatactttatcaaatacaactactgtattaaatgatgatgatgatgatgatgatattgaatctgacattgattctgatctagatgatgataaagatttattaaaagatttacaaaatgataatcaatcactaaataatattactaatgatacccttaaaaatgatccaatttcagattctccaactttaccatctcatttttattcaattattcataaacatgaattaccacgtaaattatttcatatttcaattggatttttaacaatttatttacatataaatggttataaaactaaaaatgtttggcaatcaaatttattagctgttataatcattttctcattagatttattaagatttaattggccttattttaatcatctttattgtttaacagttggtttcttaatgagagaaagagaaattaattcaattaatggtgttatttattttcaaattggtttaattttaacttttattttccaaaagcaagatgttagtataatgtcaattttacttttaagttggtcagataccgctgcttcaacaattggtagaaatttcggttatttaagtccaaaaatttcaaattcaaaatctttaattggttcaatggctgcattcattactggtatgttctcttgttatttattttatggtataattgtaccaaaatttcctcaatattcaatagattttgaatataatcctttaaataatcaaattaatttattaactttatccttattatcaggttttatagcttctttaagtgaaggaattgatataattggtattgatgataatttaacaattcctttattatcaggtattttcctttcaaatgttattaaacttggtaaataattgaatttataatatattttaaatttataatattttatacttatttatcttattatttattatttaaaatttcttaactatacatgttaattaaaaatcattagaactttgctttaaatctaattttaaaatatcatctaatgtaccacttgcagctgcaattaatcctaaaaatggtcttgaaggatctaaaacttttgaaatatattcaggatgatattgagttgcaacgaaaaatggatgattttctaattcaaatatttccattctttcaccattttcatccctaccaacaaattttaatcctttatcttcaattttttcaactaattttggattaacttcatatctatgtctatgtctttcgaaaacttcaattgaatctccatataattttctaattacagtattttcactaccttcttggaaaactgttggtcttaaacctaatctcattgtaccacctaatttttctcgatcaatttctggcatataaacaactgcttgatcttcttcatttaattctgaattaaattcaattgatgatgcattttgattacctaaaacatttctaacaaaatcaattactgcaacttgtaatcctaaacaaacacctaaatatggtactttattctctcttgcccattttgatgcagaaatcataccttcaatacctcttgaaccgaaaccacctggaactaaaataccatcagctttacaaactaattgccatgcagaatggaaatttgatttattaattaattcagtttcaggttctaaatctgatgattcaacccataaaatttctaatcttttaccacatttcattgcagaatgttctaatgatttaataactgataaatatgaatcatgtaaattagtatatttaccaacaattgcaattgtaactttttcaaatgataaatcatgtttatttgttaataaattccatttattaaataattcaatacctttattcttcatttcaatattaattattaaatcatttaattttaatcttttagttaaataattaatcattttttgttcttttaataataatggaacatgataagttgaattaacatctttaattgctaaaacttgttcaggtccaacatgacaaaacattgcaattttttcaattgttggtaaatctaatgaatttgaacatctacatccaatcatatcaggtgttaaacctaaacttcttaaatctttaattgcagcttgagttggtttagttttttgttcaccatgaataacaggtactaaagaaacatgaatcaaagcaaaattttcatgaccaactctaaattgaaattgtcttaaagcttcaacaaatggtgcactttcaatatcaccaactgtaccacctaattcaattatacaaacatcaggttctttaccagaattatcaacaggaattttagaaactctttcaatccattcttgaattgcatttgtaatatgaggaacaacttgaacagttttacctaaataatcaccctttctctctctttcaataactgatgaataaattttaccagttgtaatattatgatctcttgttaatgaaatacctaaatatctttcataattacctaaatctaaatcaacttcaccaccatcatcaagaacaaaacattcaccatgttctaatggtgacattgtacctgcatcaatatttaaataaggatcaattttaattgatgtaactcttaaacctaaagttttcaataataacccagtagatgatgcaagaacacctttaccaatacctgagataacaccacctgaaactacaacgtatttcattattttaattgtctttttgccaaaagaaatatctaatagacttaaaagctataataatttcatgtgatgaaaaagttgaatttaaaaaaaatttttttttaagaaatttcatcgcaattttcatttcaaattttcaaaatatatcggaaatttaacactctcttatacactctcttatacactctcttatacactctcttatacactctcttacacacgtaagtcaaggtttggcctcttcttggtctgtaatctctttgaacgtttactcttaccctcctctgatctttccttatctccaatttcaactaatgatctaccaaaattatcttcttcctttaatttataaatacgtacaagccaattctcacttgtaaatacttcctctaaaatatctaaatgaatttcatttgcatatttagaacttaatctttgttgtctaactctatcaactggatccctattttgaaacatttctccaaatttataatatgacattttatacattaatgaatctttcattgaatcagttgctaattcatcaattctatattctcccttatcagtgaaaaatgatctttcattaacttcttcaggccaaataccttcacttatacgaatcatccataaaaatttatttaaatcatctccactatatcctaataatcctccaaatataactaatacataatcaacacctaattttctcataacaatttcactattagtttcattaactgacattgccttaccaactgttgcaatatgtgtattattccatgtattattatcaacaaatgttgttctatctgccatacctccaatttgatatccataatcccaccatgccataactttactatcttcctctgtattcatacgtaaccaataatatgcttctctaaaatcatcaataattgcagctgatccatccctatttttacttgctaaaacaactgatggtgatgaatatgcattagaattaacccaaatacaatgttgaacataaaaaaataaataaaatatcattgttaaaataattaataattttgaaattaaattggataaattggtaatattttctttattattataatcttccttcttttcatttttttcctttaaatataatttaatatctaaataaatttgaattaatttaccaattgttaaactaccacaaacacaaacaattggtgctaatgttaacattaaacgaatcataacacctgcaaaatatgatcctaaaactgaataaattataacaaaaattgattcatttgataaatcattaaaacaaagataaacaccaaatgggaaacaccaaattaaataatttaaatcaaaataaaatgatgaccaaggagttggttgatgttctgaaactgatgcaataattggtatatgaacttttgcataattagtatcccaaagtgaataaaatctaccagtccatggtgcaatccaaccaaattttgttgcaaaaattaagaaaattaaacctaatgataaaataattgtaccaaatgcaatcataaaattattgaaaagttttggtgataaaatagttttaaaataatttgcaaatataactaattgtaataaaccgaaaactccaaatgatgaaatatgatcatttgatttaattggtgaaaatctaacaaatggaatttgcattgacattaaagtacctaatgcataccaagtacaataacttgtatataatttataatcaaatctacccattaaaattaaaacaaaaatatgtaatggaatcatatttgtaatgaaaacgtaaccaccccaagctgaaaccatataaaaataaaataatgaagtaattgatgcataaaaaattgaacctaatttgactgatttaatccaaaaatagaaagttgtcattaataaagtaattgcaattgcttcattgtcataggaacctgcaactgatcttgaaatataacctggtacaattgcaataaatgcagcacttaataaagcaggagttttattattcttaaaagttttagttgatgaagtaacttcataagtgaaaagataagttgataatgcagttaatgttgaaaatgcaggagctaacataacagttatatttctaatatcaactggtaatgataatttatttaataaattagaaataacagctgaagtaaccattaaaccaggataaagtgtaccaccagtaattctacctaatggataccaagttttatcatcaaaccaattaagaaatttatagaaagtatgattaactaaatatttagttgctctaaaattaaaccaagggtcaaattcatgaataattgattcaaaacgtataactgagaataatcttgaaccaattgctgcaattgataatgagattgcaattgatgtaatcaccaatagacgtaatgtagccaatactgaagcatcgacacgtagatacccttccttatcaaatgaaacagccattgccaataggaaacacaggaagaaagacacgataaatgtagtaatttaatttgaaaaagacacatggtcttctttctcactgaaaattcaagtttttcacttcgcatagtgaatacatgaattcatgacattggagaggtatatattattattactgttattggtattttatactacaatttgctatagatactgctactatggaggacaatgatgggttggatttgaaacctcagaggggtaacagtaataatactttatcaaatgatacaacatcagctcagagagctatatttgaagagaaattagaacaaagtaaaatggaacatttccgaagaatccatgcaagggatccaacaccttcagttaagagtatatcacctatgagtccacgtactgttaaaacagtacccaatagagttaatcataatatgggtaatattaataatggtaataatatgagtaataatataagtaataatggtaatggtatcaatatgcaaaataatttacaaaataatttacaaaataatatacaaaataatacaaagaataatttacaaaatatacacaacaacaatagtaaggtacagtttagtaatagagtgatatcgataaataataataataataacaacaacaacaacaacaacaacaacaacaataatatgaatataaataataataccaacaatagacaaataccaccatcggcatatcccctaaatgatcaatacagagcaacatcaccatcagttcatatggctttctcacctccaaagagaagtaattcaccatttagagatttacaaaatcctaatattaaacaaattaatgatcaacagagaccattatatacaccagcagttttaagagttgttaaaaataataatttagattcagattgttattttgatccacatagaataccatcaaataagaaaaatctcaacaacaataacaacaataacacatcatcttcaagtattagatcaactgcttcttcaattgttgattattattggaattatttaacaggtaataaattatcatcaaatacaccaattgattatgaaggtccaagtactgatcattgggtacctgattcttcaagattcacatgttcacaatgtggtagattatttaattatttaacaaataagagaaggaaacatcattgtcgttcatgtggtgaaattttttgtggtgattgtttaaataattatatttatcttgataataatgcaaaatttacattatttggtaattcatgggatgataaaataattacaattgatgataataaatttttatgtaaagtttgtcataaatgtttccaaaaatatgaagagtttgtgctggatcatacaactagagatcataatcttggtactaatggtaaagatttaaataaatcaaataataatgataataatgataatgatagaaataataatgatggttcaatacccgttgattgggattggagttctttctaaagaatggaataatatttatttatacaaaaaaaattatatattatatattataatctatattaatatctatacaacaacaaaaaacacatgcctatgcttctctttctctattttctttaataattttctctcgtatcatatccatcatttgtgatttactactattagaattatattcagaatcagatgtaacagattctccatcactagtaattgaaattgatgaagattcagtacttgatgacatatcatcagatgcattaagaattggagtatcttgagtcatttgaaatttagtatcaatattgctattattattcatgttattcttgttagatctctcttgttttttctttaatctacgttgtcttaattcgaatgttttcaattcttctaattcttcttcttcagttaatccagttaaattgatttgattcttcattctttgtttctttaataattgtttagtctttgatttcttatcataatcaataatattaaaatcaggatataattttggtccaaagaaattaatagtttcagtaatttcaagtgataatttatccctcttatttttcaaatcttcaacagttctcttatttgttattaataaccataatgattttgcttgtttatataaatccatacctttatcaccgaaaattaatgcacaataagtaattgtaactgatatcatataaaatataataaatgataaaattcttgaaatatttggattatagtaatgaataaatttaataccaataattgaataaattgtatataaaattggtgcaaatcccatactaactaaaattttccaagttgcaataacatcattacccttgattttaacagttgaaccagctaatgcttctcttctctttttttcactaattttctttgttgcaatgaaaactggtgaaaataggaaaatacctggtaatgctaataatgtcaaaaagaatattttgatacttgcaataattaattcaaataaaagtgaaattttagatttttcaattatattaccaactaaatgatcaggtatattattaattttcaataattcattataatgtaaaatttcattacttaaatttttaatttttgggtcatccttaaaatgtaaataaccatttaataatcttctattcatttcaacaattgaaccagttgataatttttgactaaaattatttgaatataatctacgagctgcttgaattactgataaactttcaaaatctggacatgataaagtaactgattcaacaccttttgtaattttttctaataaaattttaactgcttcacttgttgaatttgaatttgaataaagtgaaagtaatttttcatcaatttcaattggatgaccaaattcaactaatgctcttgatctaaatttatgagcatgaaaataattcataccaacaggtacaattttaacatttaaaccgggagttgcatccattgcacctaatgccattaatgcaacacctgcctttaatggtaataagcctggtctatcatgtgaaccaccttcactgaaaacaccaatacaattaccttgagataaatgttcaaaaacttgtgcataaacttcagattgatcaattttttcagctgatttaaaatttgcaccagttttaaatatttctttagcctttaattctgcatttttggaagaatatttaaaaggttttttcaaaaataattcagtgtcagatacaacattttcaataacagcagtacctaaagaatttggtaatgctattaacccctttgattcacaatcttttaaaaaattagtattttcaccaattatatgtaattcattatttggatctaatttaattaaaccatttttatttttcaaattatcttgagctcttttaacaggtattgccagttgacttcttgaaactaaaccaataaattttcttctatgagatttttcagcaataagacaatgaactctacgatttgaagcttttttaacttgactcattaaaataattggatcaacaaattgatttgcatgaggagctgcaacaaaaataacgggatcttcctttggtactttaaatccaccccttgaacgtatatcacgaaagaaacaatcgaaaacaacacaaaatgcccaaagtattaaatcataaataaatttcctaaacggagttgcaggaacgtaaagtttccttaattcatcataccttctcttcattgaatcattatcatttttagtatccttattaatagttgaaacatcaccattattggtgtgtttatcaccttggttttccattgctcaaaagaaaagctcattcagtcagtcagttgctaatataaaaacatgcaattactttcatggagcggtatttcaaaatttcaaattggcaacatgaaatttaattcttaaagatttactataggtctttactttcattagaacagtatgagtgaattaagtgccgctgagaagagaagactgttgcgtgagaagagagcagctaaattatcacagggtggtgatagaatcaataagattttaggtactgataatgttaataatacaccaataaatacaacaacgggtattgaaaaaaatgaaaccaaaagtaataataacaaagttaataatagaataagtactatattacaagataataaaattgaaattgaagatactattgaatatgatgatccaccagtttcaggattaggtgatgaatcattagagagtgattcaccattaaatgaatttatttcaaatgatgaaattgagaaagcattaaataaaatgttattaaatagtagtaatgatgaaaataatattggtcataatcataataaaccgatcgatgatccatttgctacaatgtttaaaaatatggaaaatatgaaaggaatgggtggattaggaggaggagatatgaatggtatgaattttggtaataatattaagagtgaatatgatattttaaagagtaaattttatcaatcaacatatgttattattagatttattataatttctacaatgatgattaagaatgaattttttaaaaatatttcaagttggaataaatttttaattttagaaattttatttggtattatacaattaatttgttgtattaatggaattttcccaaataatactataatgtcatttgatataacatcatttggacaaattaattcaattattaatggatatgcagttgcacgaagtttttatcatgatttttgtttatatattctagttttcgtttatttaaataagttataagtttttttttacttaaaaatgttcactatttatttatcatcagaaccaacaatttccatccaagttttaccttctttctttaattcagatgtaatttcatctttaatttttctagctaaaccaggaccttgataagcaaaagctgtatataattgaacaaaagttgcacctgcttttgcaaattcaattgcatctttaccattactaataccaccacaaccaacaagtactaaatttgaatctttagtatattttcttaataatttaaaagctttaagagctattggtttaagaggtttaccagataatccaccattttcattaactatatcacctttagtgattaatttatcaattggtctttgaattgttgtatttgagaggataataccatcaattttagcatctttagcggattttgcaattgaagcaatttcaggttcagttaaatcaggagcaattttaactaagattggaggtttaatatttggattaattaattcaccattaagattatttctttcattaacaactttagttaataaattagttaattttgattcattttgtaaatctcttaaacctggagtatttggagaagaaacattaataactaaagcatcagcataaggaccaaaattttgaacacctttaagataatcattaatttcatcaccagttttatttttacctaaattaattgctaaaaatttatccttttggaaagaatttaattcagcatttggatttttattaattaaattattaaatctatattttaaacgagctaaaacttccaaatgaccaactgaattaaaaccatatctattaataacggcatcatcagcagataatctgaaaaatcttggagcaggattaccaggttgaggttcaggagtaattgaaccaatttcaacataaccaaaacctaaattaaataaaggatcaattacttcaccatgtttatcaaaacctgctgccataccaattggatttgataaaattttaccgaaaacattaacatttaaaattttatcatcaaaatcagagaaaagtcttggataaagacctgccttaagacaatgaatacctaatatatgaccttgttcagcggttgtgaaaaatctaataagaggacaataaacgtattcattaattgcagatcttgcatctaatgaataaatacctaaacctaaagcacaagcaattaagagagaagattttggtaatggtaaaattgaagaacgaataatagattttgaagatgtagatgaagttgcagatctcttaaagagtgtattctttagagattgtctgaaagatgaactgaacatttgtttgttctaagaagggagtgtgtcataagagattataataaataaagaaataaagaagtatttaaataaaataagatagaaaatcatgttatccaggataaatacacatgtcatgaatttaagaaaaatattttgcccaaaaataagcaccgtcacccggatttggtattgaatcaataatatttaataatttattatcattatcattatcattatcatttaatatcttatttcttctaattgaatgaattgaagaaggcattgattggaatacaatagttgaaattgataatgcagcaaataaagcccaagttggagatattaaccttttacgacgagagaaatagacagcagttaaaccagcagatataccaacacaagatttcgctaatgtgatagatttataggaatcatcaaagaattcatgtaatttaatcctatcattgggtgataagttactctctaattctttgaaatgactataagatttatcactgttattattattatcaaaataccttgaaatgtccatactgatactatactatcctatccgtaaagaaagaagagaagagtataagagaaataagaatacgcgcttgaaaaacaaatttattcactggttattctcccttcttattctctcccatgctgtctctcttctattactatcttctcttggtgatatactatctgtatctgtaaatgttgttgatgtagtgttattagtattagaattagaattagaaataaccttaccttttctaatattatcccaactactaccattactttcactatcattatcttcactctcttcattagtataaaactccggtctaccatatggtggtacactaccactaccactaccactactctcttcaatttggaaaaatttattactaccttcaacttcccttggatctttcattctatatcttatatcattagctgactttttgaaataattagaccaaaaaatacttttactaattggatcgggtgtaaattcaatcatttgacaaattttactattatctccaaatttttctttaaattgatttacctgtaatttataaatttgttgattaattaatcctggtataatactaccacctaaaattgctcctaatattggtaatgcaggattaattaattgtcctttacgtcgaactaaaaatggtgtcattgatccaatcgtaactccaattgcaaatcctaataacattctacgtgtttgttgttcaaaaaatacatataattgtaatctatcctctttatttaattcatgttccttttcataaaatgcaattgctttatttctaactttctcaatatccattccagtagtgtccatattgtatatgtgtctttatctaatattaaaagaagaaaggaaaagaagagccatcatcataaaaccattcctttactaaccgaggaaaatattattttcactattctaattctattaccactaaatacttttaaacaatgcagttgtttcgaatatctacacgttgttatagagtattagctatagaaacttcctgtgatgatgcctgtgtatctcttattgatagatattcacctaataaacctcctaaattaatagatgaaaggaaattaactttaaattcaaaactttcaggtggtgttgtaccaactgatgctgcaattcataatagaaagaatatttcattattagttaatcaaatacttaatgataataattggaatacccctactattaaacctgatttaatttgtgcaactagaggtcctggaatgattggttcattatctggtggttatcaattagccctaggtttatcaattgcttggcaaataccaattgttggtgttaatcatatgctaggtcatttattaattagtagaatgaattcaaatggtggaaatccaaatttcccattttatagtttattagtaagtggtggtcatacaatgttcgttttaagtaaaagtttatttaatcatgaaattttagttgatacaattgatattgccgctggtgatgccttagataaatgtggtagagaattaggtattactggtaatatgattggtaaagaaacagaaattttccttaataaatttaaagatcaatggaatgaaaaagttgatataatgattaaagaaccaatgttaaatcaatgggatcgtaaagatattttacaatattcatttgcttcatttaattcacaagttaaaaatactttaaaaaaattttataataatgaaataccgaatgatgataaaattagagcaagattattatttaatttccaaaagacaattttccaacatctaataagtaaaattaaattagcaattgaaaaaaatagtaatgatattaatgatattaaaataaatgattttgtttgttcaggtggtgtttcatctaatatgtatttacgccaaatgcttattgatcaattaaaacctttaggtattgaaaatttccattatcctgaattaaatttatgtacagataatgcaacaatgattggttgggcaggtattgaattatatgaaaatggtttaactacagatttagctacaactgttatacgtaaatggccaataactgaattacttaaattagaaggttggaaaaagcataatatatagatatatagatatatatatagactcttgttatatagtaaagaaaggttgttcaattttatattctttaattaattttgaccaagtttcttgatctaaattgaaaacaatatgagatttactatcatcattattttgaaatcttaaatgatttttaatactttcattatttgcaagttgtaaaaacggtataccattttcaaatttatctaaaactaacataccattattaattaaaaaacttgtaataaataatgtttcaattgatttaccaaatgatataggatttaaaataacttcaaaaattgaaattggtttaccatattcttttaaccttttaaataatttttcagctaattttgatgtatcatctttaacatctttattaataacttcattagcagattttaaatcagctgtcttaataacattattttttttagaatcatcaattaatctttgacgtataattttcttctttttagtaataactaatggaccaagtaaaaaatcagaaccttgaacatttttactaattgaattaaataataatcctgcatttgaccaattatattcaggaattttatcaaattcattgaaaattttctcttcatcattcgttatatttgtaaaacattttaagaaagaatttgtaaataattggaaattaatagttttatcacttttaccaaatttaacatttttagttgcaatttttgcttgttcaccaatttctcttaatgttgcagaatctgttgcaattataacagtatttgatgatgttttagtatctttaaataaattttcagcaattgtaagttgttcagtaactattccaataccttcatctgttgttaatttagatctctgattctcaagtttatctttaagtttacgatatttatcagataatttgaattgttcatcttcattaagttgtttcttaccaaatgtatcatcttcttcatcttcatcttcttcactttcctcctcttcatcttcctcactcccttcttcatcttcttcctctccttcttcacttatttcttcactaatttctttgtcttcctcttccaaatgtcttctctttgacaccctgtcttcctcttgtaacgtacgtttctcagccttgaccattgttctttccaaaagaaacaaacacgaaattcatgccgtcttcagaaatgtactttgaactttaacgcgatatgaaaaagttacacattttttaaactacatactaattattacataaaattaatttcatcatcattaataaagaatgattcatccatcagtgaattaccattaagttcacctattaaattattatgaatatcatgtatattatttaaatcaacttcctttttatgatgtaaattaatttccatatcattcatatcttcaatattcatattcatattgtccatgttcatatccatgttcatattcatattatccatattcatattgtccatattcatatccatgttcatgttcatgttcatattcatattagaatttaaaatatgcataccaattaaatcattgttaatatccttataattatcaatgatattattattattatccttatcatcatcatcatcatcatcattctcattaccatttacattatttccattaatatcaattttattatctttagaatctttacttttgaaaatatctaaatttgtattcgtattattattactgttagaattatcatctaattctaatgccatatctaaatctattagattactcatttttttatcattatgaacatctgtatcatcatcctcatcattattatcctcatcatcatcattactattattatcatcctcatcatcattatttagcactccagcactatcaaaatctattggtgtagaatctgctgaattatatttcaaatattgtaattgtgatgaatgtgacggctgtattgttgttgatgaatttggtgttccattagactgtaatagttgattatgctgtatttgatgatgatggtagttgttgttgttattgctgttattattgttatgattgttatttataccattactgataccattattagtattattattattattaagttgattactatatgaaggtgtgggtattaatgaagtatttgaaatttgatcaagtaattgaaaatttgtaattggtgttaaatttggagttattgaagtattaattatatgagaatcagttgaagaaattggatcagggaaagttgaagatgttgtcttatgagatttatttaatgaatttattaatgtacttaaaatttttaaattattaatattatcagataatatatgaggtatattattaccacctttaccatgaaatgcatttgcaacttgttgaccttcactaaaatcttcacaaattgaccattgattaagattttcattacctgatgatggatctcttgcaaaatgaactgcaaattgtggtgaagttgtaagttctaattgaagtaaagtatcatcagatgatgaatctgatggagaatttggattttgagttttatttaatattgaagatttaattatattgaaaattggataaaatattctaaataagactttttcattttgaaaaacacctgaaaagaaataatttaattctttatcctttttcgataatacaactaataaatcagttgtatccataacttcattcaaaagtttgggagataaattagttaattgaggtaatgaatgagattttaaataaccagatttaattctctgccaattcccaactgataatgttttacattcaataacataatatttaccattaatttcatttatagtttcaagattatttagacttaatcttggacttggacttaaactattttgtaattgcattgaagaggaagattgttgttgtaatggggattgattattaagattatgattattttgctgtaaatttgtatcagatattaaatttggatgattttgatttaatttttccaatttacgagcttttgcacgtctattttgaaaccatatcctaactgaacgttcaggcataccagttttatttgaaatttcacgacgtaaagcagttgaaggatttgcatttttagcaaattcatgaactaaatagttaagtatttcccccgatgcacgtgtacgtttcgttgcagagtcatttaaatcgtagatatccattgacagagaggagtatatgagagtatatatgtgatagtaaatgaaaagagagaggtatatccactgatccaaacagatatacaaaatatcaaatattcaaatgctcaacaatcctcctatatctctccaccgatatacagacactgttgatgttccacgctcagattttatttatgcatgtggtgaggattattttcgccttttcctgctctttacagtgcatcgacgcatcgtcttgtcttatttactatactatacacttactatacaacccatcttgtagaacagaagggacacactggacatgctctagtgatagatgtaataccggcttcaccactttcactttcactatctgctataacttcacttttacatagtccacatttacgtgttttacctaaaattggagctttcgtaatagaacatgatttccaatttctacctccaattgatgtccatataccttcctcattaggtttaccattaaattcttcatgtaataaccctccacaaatgggtaatttaaccttttcacctgtaacaactaataaatcaacaggtttaataacttcaattgttttacgctttttctctaataattgttcaatttcttcaattattaattcttgtgtaataactccactaactcttcttctctctctaccttcatctccaaataattcatcactttcactcttaatcttatttatctcttcatatgtacattccatttgtaatcctaattgaagatttctaacattttgccaatatgatcctcctccactacttaaactattaaattcattaacatcctcataatgtactttgacatcattacttgattttaatatagaaaatttcattgtagctctctcacgtgcaatacttctacctgtattaaactcaaaatctctattattatgattctcaagacttaacatataaatcattctaccggaaaaatcaactcttaatgtatcaatacaataattatcactctgtgattctaatttactaaataatggtaaacgattactccatttcttaaattcttcatcatttatttcctctgtaatataattgaactccttatcatatataatcttattactattcaaaacaataaatttcatattaccaactttattacatgcaataacataccatacattctttgcttcatcaaatatactcactaaattatccattgctactaatgcattcaaattcgttttcaaaacttctccattggtataaacaataacgcttccagtataaacaacaactattccataccctttcatcacttgataacttacaatataatcatcttcatcacttaaaactacctctccatcatagaaaccccattgaccatccttataccaacatttcttcactattatcgtattatcggcacttaacaaataaatttcaacactccatttcccatcatcttcaaagatccatttaccttgttcacaacgaatgaaataagtattgattccaatatcaacttcaatcttcttacttaattcaccactctcactttcatattcatagatgaaaacaccacctcttgttaaacatacaaaactacgatgaactgcattccattttttcaataattggaaatctgcacctttaaaccacattaaatattcgatcctaacacaattatcttctccttcatttaaaaatcccttcataacaattccaagatctcttgctaatacttcattaatacatgtaattgtttcaaatttaccatctttattgttcattaaatatccattccaattatcacaaacacttaaatacatacaatcataacttttactaacaccactctctgatatattcaaatatttaacatccccattcttctcaactccactatcaatacctataggtccatctcttataatattacggaaaaaattaataaattcttcatctccaaattttatacggtaacaggtaaacaagtcattaatattagtactattaccattaaaattaacatccggtttcaaaacaacaaacccattgctcacttgtataaagatttgtccatccttacccctctgtatgtcacctccgtacttcacaacctctctagcaatgtaaaaatcgtccattgattaaaagaaacaacctctagtaaaacaccaaaatccgtgtacatggaatctcaaaaaagtatctccaagtttttatattggtattcaaatgccaatcttttaactaaacttattaaggttatattctatcatatcaatacatcatacatagatgttagtagcattggaaggagcaccaggtagtggtgttagcaatattgcagatactttatgttctgatttcaattttacgcttttatcatatgtggattccacaccatctaacaactatgaatttaatgatgctactactttattagattatattacaacaaattggttagataatatggttatttacaatatttcaagtcatatacctgatttttcagatttcatgaaaaggccattcgttttattagtaactgttgattcatcaattcatacaaaatttgaaaggtcagaaattacatcactttcaaaattttgtgaaattactgatgattattatagttcaattaattctaaaacttttaaatttactgataatgctaaacttcatcttataaataatacatcaaatcaaacttcacttttgaaaaatttgaaaaaaatagatttactcaatgttcatagattaagacctgattgggattcatattttatgagtttcacagatttagctgcaatgcgttcaaattgtatgaaacgtaaagttggttgtgttattgttaaagataatcgtgtcttagcaaccggttataatggaactccaagaggtttcacaaactgtaatgaaggtggttgtcatcgttgtaatcatcctttggagtctggtccattatcaacttgtctctgtttacatgctgaagaaaatgctttattagaagcaggtagatccaaggtggaaacaggttcaattttgtattgtaatacatgcccttgtttaacttgttcaattaaaattgttcaggtcggtattaaggaagttatttattctcaaagttataatatggatcaattgagtaaaaagatattcactgaagcaggggtaacaataagacaattcacgcctccttcatatggtacaatcattctagaataggaactctctctgacttattgttgctttcttcaatgtcttcattcactaccaattcgtgctcacgttcttgttcatcactcttttcaggactagatttctttgctatcgttagatcttttaatttattctcaacttccttaaccctagaatcttccttctcatcaatcatcttttgaagttcaagctcaatttcttcatcttcttcatcatcttccttcttaccgacccagccgatttcacttgaacgttcaatttctttgtatatatcatccataacctcatcaatatctatattcttttcatttaacgtcttcaataatttaccattctctcccataatctctcccatcttagcagttgtcttagcattctctatagtaactttcatagtattcaaattatctaaattaccaagaatctttttgatctgctcttcaaccattttcttgtatcttaactcaacacgagctctagtcatcttcttttcattaatcagatctcgtattttcttatcctgtaatttgatcttctcttcacgaatctctaattgttcattaaactccagtatacaatagttcaaattagcaaactcatctaattctgaaccattcattccctttttacctaggtacatcacattatcttcaaaaattactccatcagattctttcttcataaactcatagacaaccttgaattcagaatcggttagtgttataccttccttatcacccaatttacgtaaatacttgacattaatgatttccttctccttgatcaccaaacttttcaacttttcacttatctctttaacaacgggaacgtaaacaaatgttcctttggtaacatcaactcctagaacagcttttttaacttttccccaaatagacgtctcctctccttcaagattaatcaaaccttcattaatcatctcattgataacaatatataaacctttcggaattcgaccatcgtatttaaactttaaaagcatctcatcataattgattaaaataactttccataatgtaaacgctttattgatcaaacgtttccaaactttgatattatattcatatccatcataatttttttccttcaaatgactaaagtcattgaacaacgaatctaatcttgattctcgaaactcgttgtcctttttgatcaacacatcaatactatcaaccatggttaagatgaagatcacaagataaagaaatttaaagaacttattcggaatattttttttcatgcatgtttcataataatttgccactactttatttatcaatgactttccctgatccagtggtacaagaatttagattacacttagattcattatatgccgattcaactataacaccagataaagaattattaataagatttgaagataagataaggtatgatgctgcattacacaatgaggttcaaatattgtatcatttagctccaattattttacaaattattaattcaaatgaaactacaggtgaatgtaaagaatatgttattagcttattagatattttattaccgtattacacattcaaacaagttacttcaatttttaaccaagaattattattgaaggcaatacacgataaaaggttaaagctgattatcattaaattattgatccgtggagacgttgaatttctacgagatggacaattatttaaatgtttgtttaatattttggcagatccaaatgaacgaattgcaatagtaaatttaactgaacgtgcaatagttgcaattgttatgaaaagtgacatatttagattaaaattattaaacgattatgaaattaccaatataatgaatgatatgaaacataataagatagttcaatcaagattaattgatttaatatgtgaagtattaccagttgttccaacacttgatacaagtaagtatttgattggagaggaggaaatttcattgtcaaatgatttattattttataggttttctgttgatacttggaaaagattgctattactactcaaggataatgaagatttaggctttttaaagaataagatggaatcacagttggatttttgcagtcgattatttgttggtgaaaatactttacttgacggtaatgatgtgttcattggttacgaagattttggaactgttcaatgtttaacaagattatcgtatgttgttcctgaattatttgcacagtttgattcaaagtatcatttaattgattatgcaatggataaatattgtgtctatgaaaaggcagtattctttttaacaggagtcaacacgtttttcctaagagaaaagaatgccgatttctttgaaaagttcaagctttcacataggacaattgacttattctgtcatttaattttagatacatttattgcctcacattactttgataagagtgaattacagaaaattggatttgataaattgatatttgatgatttattacaaatatttagcattttatcatcatcagatatactgatttcaaaaatggtacatgattgtccatacataattacaaaagtgataaatactaatatcaacaatgaagtttttgttaaaacacaattaattgaatcatctctcaatgctattgttgcatcaaatgttccattgggtaatcttcaaactcctattgaggagaaaatcaaagatttgagaggtcaagtatacattacagtggaggaaccattaactgaacatatttaaactttttttattagacttacataattttatataatactgtttattaaatctacaatcattataaatacaaggaatttgctgcaatgatacctctatgaatcaaagcttcacaatctgtcatcttcttctctaattcagtgttaccaatagtcttagctgcatcaacaatttgcttcaataattcttctaatcttctaaaagttctgattaatgaaccttcataaacatcagtcatttgacaaatttcggtaaatgaagctccattacaccaacggtaaacaacatccattaattccgaacggaatgattcaacatattctttttcagttatatctaatttagcttctttagatactttagcaattttactagccatttcagttaattgtttatatggttcatctaaaactggatttggttttcttgtttcctttgatctttcttggaaaacaaaacatgaaagaattgcagcacattgtgatggtgttaattctgtgaacataccattgaaaatcaattcagttaataaaagttcatcacctgttgaaatctcacacgcaactttaccctttaaatcaactatatcatcttgtgatataaaccctaatcttcttaaaacccttttacgacgttttaaatcatccaattgaatatttgattgaactgctgcaatctttaattcagtttccttaattttatcttcaagtgaaactttttcggcatatttttcataagattcattcagttgaattgaattaaataatggattagtttgaaccttggtttctaaaatagagattttctttaaaatagttttaaattcttcatcttctatcttcattttattaacagggtctagaattggtaatccatctggatgtcttttaacaatttcttttaatgccttatttagtgtctttctagcttgtttattgttcaaatcctttggtaaaatagatctacaactacttatttcttcaatcgaacttaatgttattggaattatttcagttattgtttcttcaccttcagctgctggtctgataccaagtggtaaattagaatcaaaaggtttgagtaatttaactggagcatcagcaaacattgtattaacgaaaactttaacaatataactatcatgatcagaaacagacttgacagtaccattgaatcttttagcgtcgaattttgtataactgataactataccccaaccatagtattgatctttaaccttgactttgatcattctaccactctttaaatgtggtaagatataacttggatgagtaataattttcttacaatcttctttataattgttcaattgttttttcaaatcataaaattctctaacaagctcataatcacttatttcaattgtatcaatcttgtccttcatttcatcaattttcttctccaataatggaactgcgacagtattttggaaatggaagaaagaattttgtaacataaattcaggtgagacaccttcaactcttaataaattaagaatcatattataacctaaatggaaagcagaatccaatctatcagcaacacccttaaccatacctttagcaacttgaggttccattttttcatcaatcatcataataacaataccacgatcatctaaacctctacgaccagctctacctgacatttgaatatattcaccaccagaaacccaacggaatcctgcaccatcccactttctaacggatgtgaaaacaacggttttagcaggcatatttaaaccaatagaaaaagtttcagttgcaaataaaacttttaagaaaccttcttgaaacaaaatttcaataatttcctttaagattggtaataaaccagaatgatgaataccaatacctctctttaataatggtaagatatgcttaatttgaggtaattctctatcatcttcaggtaacatttgaatagcattatcataaatctttgtcaacatttctctttcttcatcggtattgaaatctaatttagacattttcatagctaaagcttcacaatcttttttactgaaggagaaaacaataacaggattatattttttaatccaaatcattttaacaattttataaatatctgatttaccatctttaacaccacctttccaagattttccactttttcttgaatcaatagaatttggatcatctcccataccattactaattgaagacattgccttttggaaattttcctctttgaaagttcccttttcatcaacgactaaatgaataccttcaccaccagttgggaataaataatgttgtaaaggagttggtctaaaatctgtataaacaatatgacatggttgattatgaattttacaaacccattcagcaaattccattgcatttggaatagttgcagataagaaaacatgatgaacattatcaggtagtaaaataattgtttcttcccaaacaacacctctacttttatctctcatataatggacttcatcaaatataacccaaccaacttctctcataatttcagaacctctatataacatacttcttaaaatttcagtggtcataactaaacaacccgcatctggattaattgtaacatcaccagtcattaaaccaacatcaccaaattctgcttgtaattctctatatttttgattacttaaagctttaattggtgaagtatagataactctttgatgatttttcaatgattgagcaattgcatattctgcaacaactgttttaccagcagatgtatgagctgaaactaaaacagattcttctctatcaatacatgaaattgcagtatcttggaaaggatctaatgtaaaaggatatgtacgagcttcatctttacgtttatgttgaccaattggtacataatcataattaggtggaacagcaacttgatgacggacttgatgttttaatttaactttatttgaattgtttgagtcattggttgacaaatcagttgatttaacgttatcaccttcggttgctggtaataaacctgcagatgcatcaacttcacgagaagcttcaatttctaaatcatctgcaacaactggaactaaatctttattcttttgttttgatttttcttccttattttcaattaacttggattcaaatcttttagactttttagatgtttcttcacttttaaaatttgaatcattatcaatttttcttttattgtctgatgtgacaatttccgttttggttaaatcctcaacattggggacttcatcaaagacatcaaacaaatcatccattttgattaatgtgttttgtttagtaaatgtattctccaaaagattttattcgatatttcaaatactttatcaattctggtaagaataagtaaatttttttaacatggattacacaatacatgaaaaattttaaccattaaaaaacacacgaaatttccgaaatttgcgaacctattttaaataagtgcatgaaaagtgttttttattagatattagatattagatattaggtttaaaaattatttacaaaaactattataatatttatagaggttttagaagagaaggataaaaaaacacaaatgcaattggtatattaaatgatactatactttttgatacattaaaatatatgcagttttatttatattagttttctcattttgatcagctattgcatcatttggacttattctagttatattagtatcatctaatctaacccattgattatttgaagttaacatatcagctgtataatgtccattttctgttgatctaccatgatgataaacaacacctaataatttataattaggttcttcatttaccattgttgaaatacatgattttggtaatgttaaattatgattatatttaataaatttatgaatcttttcaattctaccatcaaatttagatgattgatcattaaattgtgaatgtgtttgaaattgtttattgttattattattctttttattttttttactattcaccacttcaaattcattattttctgaattgtgttcatcatttgtaacaaatgagaatcttttcaaatgtattattaaaacagatggtaatttatcaataaaattttgctttttagccattgttgaacctaatgaaatttcttcatcttgagagaatttttcaaatgctgttatgagatcatttgtttcaatatcacttatatctaattgtaattgcataaatggatctaatgtaattgaagattttttatttgaatttttcaaaactgacttaaattgtccaccgaataaattaacaattggtgataatttaacttggaatgatcttttaccaatagttttcatatttgaaccaacttcattccaactatcattatctgaatttgatgaattgttttttaccaaatcgtttatgaaatcgactgtttgaacaattttcctacttaaatctttatcactgaaagcatttgaaaattcaagtacatcaatacttgataatgttttaattgattgtataaattcttcatgtaaaccatctaataaattatttaaaaattcttcagcatcttcttgttgaccccaacttaaatgtgaaaatcttggtaatgaacttatttgtgtataaaatttatctggattaataatatcacatttgagtggagcaaatatatcattgggtgatggagattcggaggatgcatcagattcagaggacgaagaagaagaagatgatgatgagttatttgtatttgcatttgaatttattctaaaactatcttgtaaatctaataaagcattcaatattggagttgttgaatttttatcatctaaatctttgaatgtattttctctaattatatttaacatttcagaaaatggattacaatagaataaaaattgtaaaattgaattcatataacaaatattaccactattttgtaaaccatgaggataaattaatgattgtgaatcaccgctgtatattttatttatgaatttagaatcaaacattattcttaataatgtaattggtaatgcattttttggatttgttttaaagttatccgatatagtttcataaacagattttttcaaatttgaagtagttgaaccatttgatgaattctttatatttgttttatttattgtagttgaattagattgtgaacgtgaatgagatgctgaagaattatttgaattttgttgagattttgtttttttaagcatatcagcaaatgtgagttttggtgctactgatgatgtagcagatgcaggtgttacaggagctgacttgaaagttgatgattgtttcacacttggagaacttactggagtaacaggatcaggagttaatgattgttttactattggtttattcaaaggtgtggtggttgtaattggtgatgaagtagcagatggttgttctttttgcttttcaactattgaatcttcctttgcatttgatgagatagatgatatggaggaaggttcagttattatagttgaatcagttgatgaagagattggagaatttgtagattgttcagattttaataaaggtttactcactattttattattattattattactattattatttaagatagcaattctcttttgatggaaagctaataatctatgaggattaatttcatcttcagttgtaccaaaatatagaggaaatgattgattatagataccagattttgtctttgattcaattttaaagttcttactcttttcaaggaatgaattgaataattcagtgtcctgttgtgttattgtttgatctttttcaattgaagtaaccgtcataattaataattaataagtgaaaaggttgacaatcaaaagtttcaaatgaggagacagtgaagtgggttgggaaggatgtagagtattgtctaatgaaagcaaatctgttaatcaaatctgtttgattattaacaatgcacaggcgttgaagtgaaaaaaattaaatttttgggtttcccacactcttagtaatttgactttataatactggatggtgttggtttttacaggatatacttatgattatggtatatagttggggtatttagtgtgttagggggtgattacagtgtttagtaatatggtattagtattagttagtatatagtaaagaatggggggtgtatacatgcgtatatgatgtaaagagataccactactaccgacgcatagaccttatgtgattatgtaaaacatgttggcaaccattaagtaaagcagtatctttattgaaatgaccacaagcagaacatataacagtggaatcaatatcatcagtttccacaattactgaactattatgatcaattgaattaattgtttgccaaataattgaatttctattaattttatcaaataatgctaatggtttagaaattgttgggatttcattatttacccatgctgtaagtataagtgcagattgtggatcaattgaatcagtattgatattatcattattggttattaatgtggataatagtgattcaaatagatcattctgttctgtttcattaagtatttgatcagtcattgtgtttggtggtgaaaagaactagttgttgttattacgcgtaaaggttttcaaaatatggtatggtatattaaattaagtatttatggtatagaagatataaaagataggtataaatataaaagattaaagaacgttttttttggcttttaatataataaggtattggtattagtattggtataagataagatattatttgattaaactattttaagtttatcacgttttgaacgaattctatgctttttaactttatttttaaattgagcatctaaaagtttaataaattgattaatatcaattacatcacaataggaagctaatctgatttctgcatgataatttttattaactaaatctttctttaaacatgattttgttggtggttttggatttggtttaaattcttgtggaatacgtctcttctttggtgaaaccagaattggtggttgttgtctgaaaaaaggcttttttcttgtaaattcttcaaatttaactgaagtcttcctttcatctgatgaatttgaattatgatttaaattaactaaaacatttgaatcataataaggtaaaaattttaatctagcattatgaagtttacattttggatatttgcttaaattataatgaatatcaaataaatgaattatatttaaattatttgaattttttaataattttgaagtttcaaaaatttgaaatttatttgatttacaataaacttgtgaagctttaaatttaacataatttaaatgaagagttgaattttgaagatttgaagtaatattattattattaataaaatcatctttaatatcatttaatggaacagtataatcatcatcattgaaaaagaaaatttctgaagatttaagtaaatctaatttaagatcacctgaaggttttgatttttccaagatatatttattaagaacttcttctttcaatttagcatcaattgattgattattatttaaatcgggataagtatgacttgaagtatcataatttgtataaggacctaaagaagtaagtaatttattaacattttgtaaattaagattaatatcttcatttttagtaagttctaataaatttgattgagaagtaccaacagctgagataaatgcacgatttaaacgttttgcagatctatgacgacgataagcatctgtaactttagtcataatgtatagtaatagttgtatgataaattgaataataatctatactaaataagaaacaaagaaaacaaatgtaacaaacaagaacaagaacaggaagaataaagtggaaaaaaaagtgattgataagtttctaaaatatgggcattactgttggcttttatagtcgtctttcaattacagaacaagatattcagtcatggtgtatataacattacctaaagaggtaattctgtaaatggtaattttctgcctggaagacatgtatgtaagcagaccaagtcgatgcgtctacatctccataagccgataagacgatactaaaccccgcccatagggctctaaaataaaaaaacaattaaaaaaacaaaacaaacaattaaaagatgcaaaaagatgcaaaaagatgcgaaaaagcgagaaaaagtgaaacacccaatagaaacttgaagaaagtggctgtttacaataattacatcatcaaaacaagaaaaaaattactattaatagtgattttttcctttcccttttctttttgtcccggtgactgtttctaaaaataacaccgcgatgtttatctattgccgttttgggaaagatccaccggttgtagagggtcaacaacttcaataccgcgttttcattggtcatcgtgtgtttggcctcattttcacctataactctcgtcaaaattatataaaaagacacctactcccccattttttaacttattcacccatattctattcttatctttttcttcttgattttctaaaatctttctttcttcttcttttatcaacgaatagttcttaatagtctctcgcttaatcaatcaaaaatgcaattcttatacttagcaccattagctttagcaggttccgctgtcgcagcattctcaaactcaactgatactactatcactgaagttgttactgcttacactacttactgtccagaaccaactgaaattacccaaaacggtaaagtttacactgttactgaagcaaccactttaaccattactgattgtccatgtaccatcactcatgctccatcatctactgctccagctccatcatctgctccagatgttgaatcttcattcaccaacggtgcagctaacatgggtgttgcaggtttagctgctgctgcaggtgctgctgtctacttattataagtttgttaattattaatattttcatttaatttttaatcttttcttataatattttttcaatcagcttatttttaaactaattttaaactcaaatttataatttttttatattatctttttaatattaaattttataatctaaattttttgggatatccctatactgttaaacatttgtttttattcgtcaaaaactgtagtagaccctgcccagagtgcttgattatgatcctacgaaatactaaacgattcgatgaaagttaatgaaaaaaccagaaaaaatggaacgactacaaagatttttttttcttatatcgcgtcgatcgtcttttgattatgtaatgttgcttatgtaatatttttaatggattttgtacaactgttaaatgctgatgccattgttgatacagggtaggaaggtaattccgtatataaatcagtctcagatagcaccatgaataacgatgatcatttaaataaaaccctcaataggttatctcacatatacaaccttccacacattcttaaagagtcatcatccgtacttaattcaacaacttatcaagatatatatcaaagtctgatattaccaacccatgcaataaataattcaaataagtatgataattcagatgccaataatgaatttgattatttagataaaaaagtagatgttgatgaaaatttgactgagaataataaacatagtgaaaactcaactattttgattggtcattgtattgtaaataatggtggtatattattaaataatttatctaaagttccaagttatcaatgggggtttaaacatgaagatgaatcattagaaaataatggtaatacatcttttaatcatgatgattcaattatatcttcaaatactaatacctctaataatactaataatacaagtaatatattgacaggattatctgaatatcgtggtacaactatatcggcattacctggtaatgttattgttaatagttctggtggtttaaatgctagaatgaatagattaccaattatgaataaacattcaattaaattaataagtaattatgatttagataataatttaaagattaatacaaatgatgatagaataatattacaaggtggtaaggaaagaaatttaatgaatggattaccatattataaagcagaattaattgagaaacaaattaggaatatgaatattgttaaaaaatcagattttaaggcatcaaatgcaaatacttcatggttttcaaatactcttaataaaacaattgatgatatagaatatttacatggtgaagcaattattaatcaatttataacaaataagagaacaattagaaattatcaatgggatttatattggtatgatcaaatgaatggtaattatattaataataataacaataataatactgttaatgaaaattatcaaactttgagtgattataaactaattgaaaaattgaagtttgataaattgaaagatttacaaattgaaaaaaattcaattaacacaagcttgattactttaaataatcaaaaacaactgaaaagagatcaatacattaatcaaattactgaatctggtgcttttttcgataaaaataaattatccgatacattacaagattgtgaagatttattaattgaatatgtttatactactgatgaaggagagaatgaagatgatacaaaggttactgataaagatctaaaaccattatttgaaatatatggtgaagaacttatcaatacacaaattaaacttatgaaaagagctaataaaataatggaatcagaggatgaaattataataacgaatgaagaacttgctgagtataagaataagaataatattaatccctcggaggcagataatattaaacattcagttaatgaacaaactgaatcacataattcattaattcatcaaactagattttcaaataataaagaatttatacaagataatgaatttattatagagagggaattaccgattaatgattcaaaattaattgaaattgagaataaacttttaaataagagcaaaaataaaaaacgtgaatgttcatcaaaaattgttaaaataaaaagaactccaaatcctaatgcaattggattttccaatattagacgtaggaaaccttcatttatgtagttccttctataagtatgtgtattatttacaacactttagcatgtttaatatcatttcttaatttatgaacccataatgcaacaattcctaacaaaagtaatacaggaactaaaataatgtataataaagattttatattagcaaatgaatctttatattcatcattattattaagtttatttgattctgaagatgaataatatgatgacagtttagataatttattatctaaattatcagtatttttcaattgagtttgtaaaactctatcaaaagatcttaaagttgtatcataattatctaataaactaaattgtcttttgaacatatcacttaattcattatatttattatttaaattttggaaattttcatgaaatttaacaaaatttgttgaaactctatcaattgattttgataattggaaaatttgttgttgaataactgtttgatcagttttctctaatattgacataatcatatcaatactatttttaagttcaattatatcattattaattgaggaatcagaatttgaatttgatgattcagtactgaatttttgattttgtaattgttctcttaatttttgttgtctttgaataaattgattcatatcaggtttttgttgagttaaataatcaccgtgtaatgctactaatgtttcatcttcagtttcttttaattcattagtaactgaatcataagaaattaattttaaaatctcaaattgttcatgtttatcaaaagattttttagattcaccagatatacctaatctaacattattctttgataataaatttgataaattaatttgattagtttcaaataataatttattatcacatgtaattttgaaagttctactattagaatcatagcctaatttaagagtcattggaatacttgaagcttgatattcatatttatgagcaccaatataattatttaaatcaatctgttgaccatcatttaaataaattttaatacttggacctaatttatcatcaaaatttaataagatttgtaaaccaataaacttagatggaccaccataattagatttatcattaatatcaaaagtattatcattaactaagaacaatgataaaccagcatttgttaaaccataactaccaactgatctagcagtgaattcaattgtaaaagattgtaaattaattgaaggatttctagttgaccaaatagaacctaattgaaatccttgttcattagctgctatatgattaggtttaggagttaaaataattctaccttcattataaattgtatcatctaaaggaatccaatttttcgataaatcatttaatgaatcaattgtaattaaattatctaatgaaatttccggtacttgggttatagcattaacggagagcaaacaaagtaagaatacttgaaataaggttaaaatccccattgtgtgttatacaattgattgtagaataatcatatataaataacttagaactgttcttcagcattaaaaccacgtaatgcatcaaattgaaatagcaatcatgaaaacccatgacaaatatctatgttgtgttcgacgcgtctacatcataataagacgatcgcaacttaaccactacaattaccgcattcagaccctctctcacattaaatctccctcagagtggcaaaaaagctcagtgctggaaaaaaaataagtttatagtggcactcaccatgaacgtagcaaatgctcagcgaaaattgaaatgttacaccttcaaagggctactctgtgttggatagttgtatttatctctaatttatctttaatttatctttaatttatctttaatttaccttatctatcaataacaatcggatcttagatcatctataaagctactatattatcagttttccattctttatctcaatacttaaagtagctaattgaaatatagaaactatacctaatataataattagtatattaaagaaatttcgttttgactttatcacaaccaaataacattaataaggcggattcgcctgctcaattaaatcaaaatcttttcccaatcatagatccatttaataacgatactaatacaagtccattatcaaaagatttagttagagctttattatcccaaatttcaatattaataactaaattaaataaagataattttaatttaactataaagcaaattgattcaatttttgaaaaaaacaaatcaatttatccattatatattaaaagattaatcaatcaattatcaactgaaatcgttgaccataaaaactttactgaatcaaactcaacttctttaaaagttttaattcatatttttaatacactaactttaaaacattgtgaaaaagcttattacatatctcaagctttattatatccagaatctcaattagctttattctcatttgataaattcttatcttttttcaatttcacagattctcaatctttattaatcctactttcaactgaacaatttatttttaataataatttacaaaataaatatagttctttattaaaagatttacaagataattatattaaattttcaaaaggtttaatcttatcattaaattcacttcaaaaatctttaaacgatccaaataataataataaaaatactgatattttaaattttacttatttattagttttattattaaattcaaaaatctttgcaattcctcaaaaatttattattttatctcatatttcagatatttgtcctaaaactaataaaccaatagacttagatttattatcacattttaatataaagcaaaattcttcattaacagcatcaaaagaagaaattagtaaatttaatctttatcaaacaaatattgtacctgtcaataatcaaatcgatcttttcttagaatctttacaaaaaatgaatttcaaacaaataattttagaattttgtgatacaaaattatctcctgaaaaattattagctgatttaatgtcaattcatccaaaggatggtataaatgattcaattattttacttttaacagaaactttacttccaggatctcaacaacaagagaatgaaaataattcagaagaacaaaaagttttattaactgctaataatttaccggaagcaactgcaagaggtgctaaaatgttacaaataattactaaagtaaaatcaaatattgattggaatttagttctcaattcaatattaaaatcattcgatcataataaacatataattaccaacatatcattatcacaatttttatcatcaatccaaactggtaaattaattgataaatttttatcaattgtttgtaaatcttcagatattcatttattaacacaaattttaacaaatattaataatttagatccaaattctggtgcaattgatttattgaattctaatttaactccaattctatcaactgaaactaattcaagacaattattactttactataaattcattgtaatgctggaaattaaaactgttgcattattaacattctctaaattaagtgataatttagtttctcaaatttttaataaagatattagagctgcacctgaatatatgattttagcttgtttacatttattacatgaaaatttaaatgctggtgaaaacgagatcataactaatattatgcaaaacttctttattaatttattagatatgaattcaccttatttaaatgcaatttttgcattatttgaagaatatgatagtactgaatttggtaaattattggttaaatatcttgatttaaagagaaatcctgaagcaattcataaaattgctaatttaactgcaacttttaaagacgataaaattataaatttaattttagatagtggtgatgatttccaaaaaaaattctcaattgcaattgttttctctcaatatggttggaaacattttaataattttattacaaaagaattagaaaataattcatcaattgttttgacaacaattattgattatttaagtactcaagctcaaatagattatgataatgctcaacgtggtaaaaaaatcaataaaactttagatttacaaactgtttatttacttatgacaactttaacttccgaaaaactaccaaaagaattatttgaaagatcaagaagtttacaaactttatgtttacaagcttatcctagattaattaattttggtcaaggtcatgattctgcaattttaatgaatagtgcaacaaatactttttcacctgatgttgaaaaagaaatgaaattatattatcaaaaaatgtataaaaaggaaattgaaattaaagatattgttcatatgttacaaagactgaaaaattctgataatcctcatgatcaagatgttttcgcttgtatgattcattcattattagatgaatatagatttttccctgaatatcctgttgaagcattagcaacaacttcagttttatttggtaatacaattgttttcaaattagttgaaggtcctgcattatcaatttctttacgttatattttagaatcggcaagagaaccaactcaaagtaaaatgtttaaatttgcaattcaagcattattctctttcattaaaagattacctgaattcccaaaattttgttcaatgttatgtgaaattcctgatttaaaatcacaacctgaattatatgaagtttgtcaaaatattgctaatggtaaaattttaccaaccaatgatcctgaaactgaaaatgttaatactttgaaaaataatattatggaagatgatccggagttaatatccaaatatcatgcactttcagttcctgaattatcatataattatgcaattcaagaaattccaccaaatgaaatttctgatagaattttatttatgattaataatgtcagtgaaaataacttagatgcaagaacaactgaaatgaaagaattattaaaacctaatcattataaatggtttgcaaaatatttggttaatcaaagagtaaaattagaattgaataatcaaggtttatatgctgcatttgttgaaaaaattgattccaatgatttttatacttatgtcacgattattactattagatcaattattttattattgaatttaacttataaaactcaaaatcaagaaaatagagatttatcatcaactgagaaaacacatttaaagaatttaggttcatggttaggtagaatttcattatcaaatgatcatccaattttacgtaaaaatttctcattcaaatttttattacttgaaggttataatcaaaatactttagattatattattccattgatttgtaaaattttagatcaaactaaaaattcctcaattttcaaatatccaaatccatggttattaggtattttacaaattttgaaagagatttatgaatttgcatcaattagattgaatttaaaatttgaaattgaagttttatgcaatgatttagaaattaatcttaaaacaattgagccatctaacatcatcagaaccactaacttcaatgaattatacagctctgttgaatctgaaaaattggtttataatatggctagaatggcgttaaatgaaaagagaggtttacctgcaatcattccaactcctgaattatccaacaataataatttattacaacaacagcaacaacaattatctactattcaacaaattcaacaaatgcaacaacaaagattacttgcacgtaatggtgttaattccccagcagtttcaaatggtactccattagctcaacaagctggtcttatcaatcaacaacaaggttttaatgcatttgaaaacttacttggtaatactattttcactagccaccctgctttaaaacgtattttccaactatcaatcactaaagctgttaaagatttattacctccattagttcatagaacaaatactgtttgtttagttacaactaaggcattaattgaaaaagattttgcatatgaagttgatgattttaaggttagaaaagcttatattaatactgttagattttttgcagaacatttaattttggcatcatcatcagatctagttcgtgatacaattaaaaacaatcttcaaaaatttttacaacattatatgagtacattgaaaaatccaattgatccatcaattgctgaacaaattccattagcagctcatgataatcttcaattagcattatcaattattcaaaaagcagcagttgaaaaagttgttcatgatatggataatgcaatgttaccacatattgcattaagaagacaatttaaagttacgtcaccaaatcaaccattctgtgatacacaaaatgcatcagaatatgcaaaatcattacctgaaccattgggtattcaaccaggtggtgtttcagctgctcaattttcaatttatgatgaatttggtagagataaacttggtttattaggtcaaatgaataatgaagatttagatattagtggtaataacgagttatcagctgaagcaaaacaaagggttttacaacaacaattattgttaagacaacagcaacaacaacaaatgcaacaacaacagcagcagcagcagcaacaacaacaactacctcagcaacaacaaccacaacaacagcagcagcagcaacaacctcagcaacaaccacaaccacaacaacaacaacagcaacaacaagcacagctacctcagcaaccacagcaaatgaacaatgctcctattagattacaaaatcaaggtcaaaatgttgttcctgttgctgttttagaacaaacgattgtatttgtcaatcaacatattgaagctattaacaaagctattgaaggttttgaagataaaaatgttagattatcagatagtattacagaaactgagactatcaaaactttattggttgaaattgttcatgcattgagtagagttgctcaacaagaactttacatgaaatatgttcaaatttttattaatttattattcagtatgacagaaccatcacaattattcattgattcatttattttcttgattggtaatatttgtgatgtttcatcagttgttgttagatatgttacaatttggttattaacttcagatgatgaacgtaaatataataaaaatattcttctgacatttattactgaaggtttcatttcattaagtgatttatcatatgcgctggctaaaaatattgagtcatccaagaatcctaaaataattgcctttgcttgtgatttaattaaagaatttgtttttggtccaaatccagttgcattaagatctgattttgttgatcttattgcagttttggaaaatggtgatgaaagtattaaagaaaatgaaaatgttaaagaattatttgatattttaattagttcaactcgtgatgatgcaattatcagattgaaaagtggattacttaaaactggtactgttgaagaatatatggtttatttattctctgaatggattaaattatacaaattttcaaatgatcctaaatatcaaattgcgtttatttcacaaatggctgattctggtattttaactaaatctgatttatttacacaattctttgcaagtgcattagaagtttcaacaattgcttttagtaaagaaactgataatttcaagaaatcttcaatagaaagttatacatcaattgattcattagcgaagttagttgttacatcattatttattcaaaaggattcaacatcagataatgttactagaattgatttcttaaacaaatttttctctgtattcattttaacatttgccaatgatcatgaagttaataaagaaaatttcaatgaacgtccgtattttagatatttctcaactttatttgctgaactaactacattaagaggtaagaattatgaaccatatgcaagtaatgaagatgagatcaatgtttataatggtttatttgttgaaacttacaaaaagattgcagatttcctattatgtttacaaccaccggcattcccaggtttcacatatgcttggatgtgtttaatttcacatcgtttatttatgccagttattattgaattaagtaatgaaaatcaagtttgtggtgaaaagcttacagcattactggtcaaattattaaaattccaaagtggatatattgaaggtaatacaattcctgaatccattacagttatttataaaggtactattagaatctttttggttttactacatgattatcctgaatatttagcacaatggtataatccattagttagtgcaacatcaatgacattcttacaattaagaaatatgattttatctgctgttccatttaatatgaaatttccagatccattccaacaaggattaaaagttgatagattacctgaaattagtattccaccaattattctttctgatccaagtcaaacattaattaagaaacacattaaaaagaatgttgataattatttgaggattccatctaattcattattaagacaaattttacatgttgttgaacttgatgaagaagttactgaatgtggtaatggtttcaataagattaaatatgatacagaattgattaattcattagttttatatgttggtatttcatacgttgatgaaagagctaaaaatagtttaagtttcaatgcaaaatcctctcaagttacattattaacttcattaatgcaagaaggtgatgttgaattacagtttttgattttacaagcaattgcaaataacttaagatatcctaatgcacatacacattggtttagttgtatcgttttacatttctttggatctaagacattatggaatgataagagagaagctgttcaacaattaatttcaagagttttattagagagaattatttctcacaaaccacatccatggggattattgattacatttattgaattattaaagaataaagattatgaattttcatcattaccatttaccaaaattacacccgaaattgaaaatgttttaggagcattaattaaacatgcaagtagtactactagtggatcaactgtttcacctgtaactgcaccagaaacctatgtttctgttaaatgaatgtaatatttgctttgcttttctttgctttgcattacattttaaatacgtgacatatatataaaaatattgtataatagattataaattttaatgattataataagaattcaaagtaaagtatagtaaggtaaaagaggcgttgaaaataggtttcgcatgtaattaaattttccattgatgttggattgattaaggccaatttcttcaccagagaattctgagcaatcaacaactacagacaattgcactatgctttctagtctaagaaagagggttagtaaactccgtggtaccgctgatgatgattcagatgatgaagattatgagttacgtaacaaagttgcaaagaagttacattccagaaggccaccaaatactgcattcagacaacaaagactaaaatcatggcaaccagttttaactgcaaaagttgtgataccgttgcttttactagcagcagttatatttattcctattggtattgggatatttttatcgacttataatgttgaaatgttacaaataaattatagtgaatgtgatagtaaggcatcatcagatctaagtgatatgagtaagaaagattatagtcatcattttaaaacttccaataatgatgtaccacaatggtcatataatagtgataggaaaacatgtacaattcaatttgaaataccaaatgatattaaagggaatgttttcatgtattataaattaacaaacttttaccaaaatcatcgtaaatatgttgaatcatatgattggaatcaacttagaggtgaagcagttgcatgggatgatatttcatctaaatgtgatccaatgagatacagagatgataaaataatatatcctgccggtttagttgcaaattctttatttaatgatactttttcaaatttaactagtattgatgataatggtaataattatgaattttcatcttatggaattgcatggaaatccgatttaacaacatataaagttagtaaatataatgttagtgatattgtaccacctatcaattggatggaacgttatccaaatggatatgatgaacaagatttggtagatcttgcatcaaatgaacattttatgaattggatgaagacagcagcattaccaagttttatgaagctgtacggtaaacatacagaaaagggtagtatattaaggaatggtaaatatagtatagatattgaaatgaattatccagttactattttcggtggtacaaaatcattgatattaactacatcaagtgttgttggtggtcgacatatgggtttaggtatctgttacttagttgcaggtggactatccatattgttcatgttactctttttagccaagcaattacttacaagaaataagagagaacattcattcttagagaatttgaatgaagggcaagcactttcagcctctggaatgagacaagttctatagtttatattctaattatatatacattatatattgtctaaaagtctatgtactacagtactacatgtatccatcatatgaatgaaaccttgatgaaataatcaatataataaatttatcgggagattttcaatgttactgagggatcttgggtttctggaagggaaactttaatagttacaaccattttcttttctttgtttgcttttaccttggttcttttatctttctttaatcagatagatagtaataacaattatataaatgagtagagcaaagaggattgcaaaagaattagaggatgttaaaaaggatcaattatctggtgttacattagaaatggcagaagatgatgatctctcacatcttaaaggtactttccttggtccacctggtaccccatatgaaggtggattatttgaagttgatattaaaatacctagtgaatatccatttaaacctccaattatgaaatttgatacaaggatatatcatccaaatatttcatcacaaactggtgcaatttgtttagatattttaaaagatgcttggacaccaatattaacattaaagagttcattaatttcattacaaagtctgttacaaagtcctgaaccaacagatcctcaagatgcacaagttgctaaaatatatttatcagatccgaagaaatttgctgaaactgctgcaaattggactaaaatttatgctccaaatgaaaattataaaccaactggtaaggaagattacagtgattttactaaacttgctgaaaatcaaaaaattattaatcaagatattgatgattgtgaaaaatatggtattgataaaaatactgttaacatttttgaagatatgggattcccaagagataaaattatagatgctttaaggaaacttgatcttaaacatgtcagaattgatgatgatatgactcaacaaaaggttcttgacgaaattctcagttagttattcattttattttatacattttatacattttataaaggtttataactgcacaggtgtatatgcaaggttttcctgtgagaatcttaattaattgattaaattttatcatggatacaaagtttaaataaactataatctataatggcgtagttaatatttaattattatttcttctatcattattgttgttgttgtaattattatgattatgattataactattgctgctattcttgctagatttcttcttatatggtcttctcttctcaattactagatcatttttatgttgatctttaatgactttcttatctaatgccttatgtagcatttcttcggaatcaaattgtgcaaccgcattatattgtaaaacttgaacgcttttaaataatactccttcctttgtaagtgcagcttcaattgcatctttttgtaaacttccatttttacaagtaattgaaatttcataacttttgttgtcagtagttggagttgaaaaggaagtagatggtgcagttgaaggttgtgtaactatggttttagtatatgatgaaacagatttaccagtagatgatgaacttggagcagatgtattattcttaagattatttgcccaacttattggtttggatggtgttggagcaggtgttaactttgctgatgattgtactttagtggttggtgtttttggtgctgatgtagtttctgaagaagagttattgccacttacagcagatgacggtgcagtcatttgagactcaattgtttcatgttgaaaagatgatggttctgttgatgcaggtgtatttgaagatgttgaaattgatgctgcagttgatggtgtagcagatgtagtatttgtcactggggagggagatggtgatattgttctctttgattcagttgatttatgggattcagatctattattggttgatttggatgtatatgttgaagatggtgatgcctttttactagtagatgagtttttagtatgagatattttattactagatgatatttcaacattattggatttattatttagaatttcattcttagtatcagattcaacttttttgacaccatttgattcactcttgattggttcagctttttcaacaacctcttgttgaactgcagattctggcttatcgttgatctcacttatagttgagccatttgtttctcctttagagatattttgaacttcagcatcagtatagtcaattaatggaatataaactaaaatatcactcttaatactataactatctcttttttcatcaggacaaagtatgaacgtttgagtgaatgttctagttggtaagattttatcctcatcatcatcattatcataatctttttgaagaagtatttcaccgacaattgtactaacaagtgattcatcagattgtttaattgtattaactgttaaaataacaattttactatatgataaaacagttaatgatttccaatatttttcaatatttggtaatgtgttgaaatcttcagcggtatcctttgattgttcaaaaggatttgtatgcttcagtacagcatcttccctatataattgataaagttttgatggatcagatgaaagttggttatagtaatatgttataaaaccggtgataatatggtttggatctttttcatattctgcaaaagtcatattgattagatatcttttttagttttgtttataaatgggatgtacttttattctaaggtgtttaacacactaaactgctcggggtttactgtctcaaaaggaataactcttttgccactgtaagtaaaactctccaaaaaagtcccactggtaaatccaagaaaaagctcctcgccatttttttctattttccagtaccttcttcgttaaagtttaactgttacttaagtatacatgtttgattaacactctgagtaattgaattgaaccaagtgtaatttacaaaactatataattatataaatgaattgtagctgtaatataaatcatctattagaattgtggcaattaacgattcataaacataacattttgattattattagatttagaatcagttgaaagacctggtggtgcattgatattcattggtgtattcatattattcatattatttacaccatttggcataccattaggcataccattaatcaagccgtttggcataccattattaggaataccattcatattattcatcatcatattattcatcatcatattgttcatattaccattaattccatttggaacattcatattatgcatattcatattattattcataccaccattcatattattcatattgtttaaattattcatgttattcatattattcatgttatttatattattcatattgttcatattattcataccattcatattattcatgaaattattcatattcataccatttggcataccatttggtaatccgttaggtggaataccattaggtggtggtccattaggcattccatttggcataccgtttggcataccattcatcataccatttggtaacccattaggtaatccgttaggtaatccatttggtggcataccgttatgaagaccatttggtggcataccatttggtgggattgcattaggtggaataccgttaggaggaataccattaggtggaataccattaggaggcataccatttggaggaataccattaggtggtaatccattaggcataccatttggcattccattcatcataccattcatcataccatttggtaatccattaggcattccattcatattattgaaaaattgttgttgattaccaatatttgtttgagctggttgttgattatttatttcatttctattagattcaccggtgttagaatcaaataaattagaatttgatgataatggtgttttgtcaaccagttgtggtctttgttgtgatgatatgttttgattttgattttgattttggttatgagattgtgattgaccttgaccttgaccttgcgcttgaccttgcgcttgttgtaattgttgtgcttgagcttgagcttgtaattgttgtgcctgtaattgttgtgcctgtaattgttgtgcttgtagttgctgtgcttgtagttgctgtgcttgtgcttgttgtgcttgtgcttgtgcttgtgcctgtgctgcttgtaccgcttgtgcttgtgccgcttgtgcttgtgccgcttgtgcttgtgcttgtgcttgtgcttgttgagcttgtaattgagcttgcgcaagtgcttgtaatttagctctagcttttacatcaccttgtgatcttatttgagatttgaataatttagataattccatgaaacgtaattctgcttgagcaggagttaaattttgtgattgttgtaatccttgtataatttgttcacgtgaacgcatttgtgcttgattttgtaataactgttcagggtttagttcaagatcattaacaatatttggttttggtgaataagcaaaattatttgaaggtaaatcaagtaatttattaattggagtttgattaattgttgatgaagcatcatatagaccaaaaatttgatttttcaatttctcaaattcaattggattattaagtctcttcaattcccagaaacatagataagttaataaagattgaccaccaacttgagttaagttggccatttcaagtaatttactaaaacctaattcttctgttaaattttctaaagtggcaccatttttattagaagaaatcaacttaatatcgtaaaaattagaaaaatatttagataataaattatcaaattctaattcacttgatgacatttctctattgatcattaatgataatagaaatccaaaatcataacctgcattaaaactaatccaagtaacattatcaattaaacataaaccactgtcaatcaaacattgagcaaattcaaatctatctataccatttgatttcagtttagtaaaatttaaaccagtgttttgtaataaattaattgattctttatcaaacatttcatcttcaagatcataataaaagttaaattgccaagtagatgaaacgccttcaggtctattaccatctttatcagataatgttatacctatttgaattaaatttaataaatcagcatttgatctcattgtttgataatgataatctttcgttgatctaaaagaaccaattggccttgcaactatacctgcaaattctgttgataaaaatatatgattgaatctttcagctaattgtctaattgcaaccatttcagtttctaaattttctttccaaacttctttaatcattaaatgagattgatatttttgtgacaataactggttgttgtttatatcgtcagttgattgtgtatgatcaatatttggaatcagattatttataagttgttgctgttgctgttgttgttgttgcaaggattgtaaaggttgttgctgttgtggttgttgttgttgttgttgttgttgttgttgttgttgttgttgcaatgatggaagttgtgtttgcccttgagtttgaccttgtccttgagcctgtgcttgtgcctgtgcttgagcttgaagctgtgcttgatgctgtacttgtaattgataaagttgagctaaagtgatattatttttgccttgttgggcagctggattaaaaccaggtgtgctgattgaatttgaattgattaaaccctgtgcttgatttaaactttgtaaaggagtttgacttttcttatcttgttgttgcatttgcagttgatgttgtaaagcttgttgaagttgactattttgagatgttattgctggtgattgaggtctattagataattgatttaaatttaaattagatgtagtgttgtttgcactttgatttgtatttgaatttgaatttgcattagcattttggttattactattgctattattattgttgttgttattattattggtgttggtgttattgttcgaattagcattctcttgatgttgctgtaacatatttaacaactgtagttgttgtgcctgctgttgggcctgctgttgggcctgctgttgtttctgttgaaattgcattgtttgaacaaactgagccatgtaatacaggggaaaaggaaggcaaactagtcaaagcaattatttcacccataaaatattactgccattaatactcattcaaattactcgtccacttcgaattgattttcttcgcaattttctacagatttttatataggccgttttctacaatagggattatttctataatataaatatagaaaatctattgtaaatattaatattatactgtaaataaacgattagcaaaatgggacaaaacaaattatataaatataaataaattggtgaaaggttgtaaaaagatagaagggaataagtataagatatagcaaataaaaattaattaaaagttaataaatcatcaaatcactagttttaagttcttttgttatttatttttataccctttgtttctttgatggacgtttatcatcttcatcttcatcttctgctgaagctgaagctgaaacttcttcagactctttattttcagattcttcaatttgtccattaacttcttcattttcttcattatattcagcttgttcagcttctaatgcagctgcctctctttctgctctctttctcttataatgtgcctttttatcttcacctgttctttcttcggtatcttcaggtggtggtacaaaccatggaattttaccacgattaaaatcttgaataacttgtcttgcaacaccagtttcatcaggttctgcacctcttaataatttacctgtctttcttgctaacatttcaataaattcatctgcatctttccaaccacttatttcataagttctttcaagatgttttcgttgacattttgctaataaatctggtatatattgtgcaggatatgaaacatgttcaattctaacaacacctctaaataaaatatcactctctgaatcttttgttgaaggtggaacaatacctggacaatcaatcaagaaaattcttttcattaatgtaatatattgccaaacttttgtctcaccaggaattggtgcaacttgacaaactttcttacgtctcaatgtgttaataatacttgacttaccagtatttggatatccaataaaaccaacagaaatttgttttctatctttatgtaaaactgaaaattgtcttaaaagttgaatcaatgaacctttaccaaatgaattagtaatagaagcatgaaatgctaatgttggataatcttttgataaatgtttgacccatgcagcctataataaaattataattggttttgattaaatgttagtaatttgtttttaattgaatattttgacattgacaatcttgtaattccttattgatttaatttcatatcatttcatatagtatcataaaaaagtgaaaaaaaaactgaaaatactacaattgtgcggtttcttactacgaacaacggcatgatgaaaaatcaataataataattgattgccaaagttcaactcatagaatccgcagaacatctaaagtgatccttcaaaacgaagtctcgttgattaaatcaactccaaaacggagagcaaatcgggcgatgtcattaatcttccaaggatgtaacagataagctatatgaattattatgataaaataaaaaatttcaaattaatgaaaaaacttattttaatagaatatcctgacaaaatctttggtgtcttaaaatgaataaatttgaaaatgaaaatgaaaatgaaagtatgatatgatataaaaatgaatcaattggaataaatcaatttgaagaatcttatttgaaatacttacagcaacccaagttggaactaaatcacatttatttaatacaaagattaaatgtttatgaggacattcctttttaatatattgttcaacagaagtacatctagtacctaaaggatctcttgcatctaaaacatgaataacaacatcagaagaatcaataactttatataattcattccaaattctctttgattgaccctttgaaaaaatatattcctttgtttcaggtgtgaaatcatcggtatcaataccacccattaaacccataacaggttttaaaacttgtttttcttcaaaatcttcattatctttattagttaaagaagctaattcctctaatgaagaagcagcaatattatttttctttctttgagcttttggaccaaaagtttttgaataagattcagtttctaaaattttagaagttggagattcagttgaatctttttcatctaaaagagacattggtaatttatttctctttaataaaactgaataagtatcatgttgtttatcagccattgcatctctaaaatgtgttaaagcatcttgagcaataactcttgtattaccaaaccatcttctatttggatcaactctagcagttggaattttagtatcttgtaaataagcagcttcgataacttcaccctgtgcattacgagttgcaccaccactcttatacatatttaaatgtttaacctttttagcatctctatagaaattttcacccttaacacgtaaattaccatctctaagatcaccttgtctttgacgacgtgccttttcagtcttaccggtagccattgtgatacaattgagtgaggttggaaccagaaaggaagataataaagatttccaatgtagtaaaaattttccaaaataaaataaaaattagaattaaaatgaaaatgaaaatgaaaagtgaaaaattaaaaaaagaaaaaaaaataaaaatttttttagaaagaatcaaagttacccgcagagatatcccaaagattacgtaacaacatgaaattttgacttattatcgtaatgtatcaataaagggtttattatgattatgttgagatagtgtttatctcggttattctgataaactaaccaggatatggtcaaattgagtaccatagatgatgtcttggacacttcatctcctaagaagaaacatcatactgctcaatctattcaaataatcccactgactaataatcaactggatgtagataatatagagtttattggtaataatagtaaacaaaaagtagaatctgattcaaaatctaaatctaaatctgaaactgaatctgaatctgtttcaattgagaaaatatcggaaaaggtatcgtcatttgaagaaataataaagactaataatgaaggtggtatacccaatgataaagttgataaagttgatggtaataataacgatgatgatagtattatttatgatgaggatgatgatgaaatagcactaaaacttctacaaaaattaattgatagtcggaaacagaaagctagacaacgtaaaatagaagaacgtgaaaaaataaaggaaattgaaaagaagaaagttacttttaaacctataaaaccaaacgaattagccaaatcaattcctcaattaataaatgatgattttacaaaaacattatcctcaacatcaacatcaacatcaacaacaacagcaacaaagaaaaaagttgaaataccgactaaaaagaccaattcaacatcaatttcatcaattgatagacatcaaagaataatacgtagattaatacataaaattcacaagaaaccatatagaaatgaatgggatttagaagaatggaaattatttcaaaaatatattggagaatggagacttagtggagacgataaaatgtttgattctacagtattagaagatctatttaattgtgacgttgatgaattaaatattagaattgatagtttgaaatatttaataaatgtgaaaaagaattagttgtttgatcaccgatcatatatgtattatataatgtatgtaaattaaaaaggttgaaaataaatctgtgttcttgtaatatttatgtaaatatagtcatattatataggtaaatggatataaagttagttaaaagagataagataatcgataagataaacaaaatgaaaatttaaaattcaaaatgaaataaaaaaaacatatatgattgaattagtaataataataataataataataataacataaatgttgaatcttagcttggaattaatcatataccttcaacaatttgttgatcagttaaataaggaatattaactctaagtctatgacttaaaggtaattttggaataaccacaactaaacaagcaattaaattaacaacaaacaatgttaaatcataatttgaataatgagttgatattaagaataaagcaattggaacacctaataagaattttttaacaggtgtaaattgagctccattatctatttgttcccacatattaagattatcaaaagcaccattgttaaaatcaaatggagtacctttaacttggtgaaacattatataagatccaataacataagtaacattagttaaagtccaactaatttcattactaaaaattggaactaattcatataaaacttttaacagcataataataacaatatgaatgatccaagcacctttaaaatgaacccaattagcattcatattatcttgaatatcttgatcttgttttgtttcaaaagtttcaggttgaacttttgagattaaacttgatgatcttctacgtctatgacctttatcttgaggatgagaatttgttggagataattttaatttttcaggacttgattgatgatgaccgggaaatggttcagaatttatctttggagaaatatttgtcatattgtgaataataatgtaataataataataataatgtcttttaatttaatttagattgattcaagtattttttttcttcttaaaattttaaaataatgaaggtagaactaagatgtgtactaataacgcaaagagtaaataaatataggatattgtaccttgagagtagtatagattcaattaactaacagacgtcttgcagaagaatagaaagaaaggaaaaggaaagaagaagagaaaagatagagagccagtggaaaaccgtgtcatcccttggtggcaagataaataaaataaaataaaataaattgctgttcgctatataaaacaaaacatgatttctcacactaaaaatttcttatatatgaggtttcaatttctagacaataatacatgtcgtataatagattattgtaataataagtaataatttagtaatatttatattaagatatatagatgtagttagatagtatatgttatttttatttatatatgataataataagagatggaataaatagatagaagaatgaataataataaatgtctaattttcaatacttgattgttttacctttaatttagctaatttatcatattcacctgaaagaattctttctacgataacatcatcatttttatcaaatgaagctaaatcaaatttataacttgttggatcattaccatatttttggaaagtttctaaaactgcagtatcattttcttcctctgcctttgccttaactctatataataattctctctttgcccattcagtaacatccatatcatctctccaaaaaattgtaactgcaaggaaacaaaatgcaggaacgaataaaatatgtgcaatattttcccaaccttccttttcttcaccatctctaacaattttccatttaatttcaccagttgcagtatcttcataaggaattttatcaataattaaacctgatgatgcctttaatttatataaatcagaatcattttctaaatataaatcttcatatttttttgggaatgtaaataattgttcaattaatgaaagttttctctcatttgaataagtatttaaatatgcaatagttttcaattcttcctctgatggagttctcttggaaccatcctcattttgaaataaatattctaaacttggtaatttatcaagtaattcacgacatttaatttctgcatcaatattatatttattaatagtactttgatggaaagatctcttaataagaggagctctaaaagagtttctaagtatagatctagcaaacatatccgtttgattgaagggaagtttactaaaataatattagtattttatattccttatactaacctataataatacactctcattccccactcgcagtgagagagagagaaagtctctattgaaaaaaataaaataattattaacctgtacacctttttcattttatgacattattctatgttgtgttgataatttttattacatgaaagaattgccctgtttggataattaattaattgtaattgccctttcaataccctgataactttacatcaatgtcttcattgatactggataatgtctttcattcacatcccatttctggtactttccccaatgatctccttctagtacagggattgcctccctttcatatatctttttcaatttcttctttttcgatttcttcaactcgtttcactttatcttcctttaatgcttattctcgtataactgctttcaattcattgcctgttggctcaactggtactcattggttattgatattaactgaaacaaatgatttctatgttttatccctccaaagaaagaaatctagaagtaatgatgatgataatgataatgataaatttattcatagtttggaaaatacagctgagccgttaaatgaattttttcaattgaaagttgttaaacatattaatattttagagatttcattgaaaaaattaaataaacaatcttcaattgataagttattgagtaaaaaatatgtaaatacactatcaaaaacttttattgaggttgatccatcaggtagatttatttatatttcaactcgtccaggtttcattgaagttttagaatttttgagtacaaaggatgatatatttcaaatgatttcagataatacttacccttcaaatgggaatttactaaaattaccaaaatatacaattttcgaagatttacaatctttttggataaatgatgatataatcatcaatatgtattcatttaataattcttatgttcaattaattactaaaaatattgatatgtcatataatttatcattttatcagttaatcaaatcaggtaaatcatggaattttaaaaaaaataaattagttcatatattcgattcaaaacctgatgtaattatacctttcaactatttctcaatattctgctttaatgatcatcatataatttatccaattccagaaattgacttatattacactcaaattaaagatgatgatacaatttcattacaattaaatcgtttgataaataaattatcactaaattcaggtttacatacatctcttataacatatcataaactcaatgataagtctatcattttagtaacttcaaatcttgatatctatcttttacatctaagttacaattatataccctcagaatacgaaatttcgattaattcttcaattaggaaaagaactagaagtaatgatgtcgaatactcaaatagtataatttctattgaagattggtcaattaaacaaatcaatgactctaaacctgaaatatctaatcattttattcaattaaatgaaactatagtaaatgataatactatacctagtataaaaatacatattccttatcaattcagtaaaacatcaatatctgattcattaattgataataatgatgatgtttattttgctcaaaatagtcattcatcaacaataataattccatcatttaatatagatgttgaacatcatgaaattttaaaatttttcaaacttaatttatacatagttgcattagttaaatctcaaactgatatcatttcaaatacttttaaagaatttattaaaatatatgacaatgatgtatgtgttgctacttatcaattagaggaaggtatcaatgttacaaatatgagacaattagaaaattttaaatcatttttacctgaatataatgattttactaatgaagatgtttataatctggaaaaattattaaataattcatttttagtattaactgaaagtttcaactatgatgattatgttgatgatgatgattattttaaaagaaatagaactgaaattttattatttattatcaatgaaaataaagaacttgaattgaaaacaatgtctatcttgaattatagaataacatgttttgatcaattggacaatagaacatttattttatggggttataaaatgcaatttaatttagctttggaaatttttaagaatgatgttgaaaataaattagattttaaatttataattactttatctaagaaagtcccacaagttgaaaatcatataactataactaaaaaattaaagaaaaaattgagtatattatttgatccatttgcaggtatttatttaactagaattgatacatcaaataaagtaatcaaacctaaacttttatttaaatggaaattaatatctgctattgatgtatattctgaagactttattatttttggtgattattttggtaatttatttaccatcaatgttaattatggtgaaaaaataccaagtttggaaattcatagcatgtttaatctctgtaatagtccaataacaactatttcatcatataaaaataccaaaattgaaggtaataggtataaactatgtactataggtacagatgatggtaatatttacaatttaattggaaattataaaaataatgcagaattaacaaaattaactaaattgaataataaaatggtaatttcacaaataaaggagaatttcgaatacattgcaaatccatacactattgaaatgaaggagaaagatccaattaaacataacatagaccttttcaagttaagaattgatcattttttgaaaacttcattacttacagatttaccattggataattacgatgaatcaaaagaaattagcattattataaattgatatacatatagaattgaacactttgattaacaagcacaccctatagaatttttgttttcaggacaaacacattttgttatttcacagtggttgcaattgcagcttccttggcatatgcatttagttgattgacaaatacaattattttcattttctgaacatgaagcacattgacatttatcaccacattgacatttctttggacatgcacataatggtaactcttgttgagttttagatttactatcatcacataaacatgcgttagtaatttgagtttttggtgtagagcaagcacaagacatttctatttagtttagtttgtttagtttgttagttatagaataaagtttacaagtttacattcttacaaaaaggttgggattagttgttcttttatattagtaaattgagcttaatttgcctaaaaagatcataatgagtttaaattgcctaccattattaataacattgagtttatttcgccattgaaaaaatgcagaataaaagcacaattaactcaaaaaaaagtaaagtaagaaaaaataaaaaaatatattggacgagaccggagtcgaaccgatgacctttcgcttgcaaggcgaacgcgctaccaactacgccacacgcccaaaagatatctgatccctagcaggatcgaactgctgatcttggcgttattagcaccacgccttaaccaactgggccaagggatcttgttgttgttttgtaaactaaaatatgtaagatagtggataatacttaattacgtaatggaagtaataagtataaaataagtttactcgttggaccttttatttgtgtaatagacagcgagtagcaatgagacggttggtattaattagtagattgttctctaactaatactctgattaatgtcccctctcagaagagagttatacaaagttatacaggatatcatacttatttatattacaatattaaccattccttaatatagttaattaaactattccttatcaatcataccactccttatcataattaattcaatttcaatctaagtcattcctttcttactccgacatctccgaacctccgtatctcggaattcctatttccatcttatcatctttacgtaatcagcttacctaatcttcacgtggatattattgaacaacttgtatttattcccttacatgttttcttgctatgtggttatttatcatgttttggtgtactggtcacgtgacccaaaataattttatttttcacaaaaactactatttttttgaggtaaaacgttaaataaagggcactataaattatagtaaaaaattgaacttgaaatattttttaaaaacaaaagttttgcttaataatttagaattaatttttttaaaaaatgtttttgtataaatttgtattttttttaattatttaacaaataccagcttttttagtccacacaatactattctacacataaaatcttattctacatagactacatatgcatactaccactaataccatagatacagagcataacataacgcgtaaaaaatcgattgagagaccccccattaagcgaagggtttaaagagaaaaaaattgaattttttttccagtgaaaagagagtttcactcagtcgagaagtattggaaaatgggagagggcgtgtttcttattaagatttttatatcattaacagaggttatacttttaataattacagtataatataacaatcagactgtatttctattcgtcatgtctacaatagtgaaacctaaaaaacaatatggtgttactgaaccaatttcaatagatggtccatcaaaggaagaaattaattcaaatgatttaatgattcaagaattaaggaatcaaagttcttttgaatcagaggttgaaactgaaaagagaaggaaagttttatcaattatacaacaattaactcaaacttttgtttataatgtttcaagaaggaaaaatatgagtgaaggtatgtcaaaagatgcaggaggtaaaatttttacatttggttcttatagattaggtgtttatggtccaggttcagatattgatacattagtttgtgtaccaaaacatgttagtagagaagattttttcaatgattttgaagagttattaaggaaaagacctgaattacaaaaaattcaaccagttcctgatgcctttgtaccaattattaaaattgttttcgacggaattgatattgatttaatttgtggtagattagatatacctcaagtaccattagatttaacattagaggataataatttattaagaaatattgatgatagagatttaagagctttaaatggtacaagagttactgatcaaattttacaattagttccacaaaaaacttcatttaggcatgctttaagaactattaaattatgggctcaaagaagagcaatttatgcaaatatgtttggattccctggtggtgtcgcatgggcaatgttagttgctagagtttgtcaattatatccaaatgcaattggttcaacaattgtttcaaaatttttctatatttatcttagatggaaatggccacaacctgttttattaaaaccaattgaagatggtccattacctgttagaatttggaatcctaaaatttatggacaagatagaggtcatagaatgccagttataacacctgcttatccatcaatgtgtgcaactcataatataactgcatcaactcaaaaaattataattcaagaattaagtagaggattagaaattatgaatgaaattcaaattggtagaaaaaattggaaagatttatttgagaaacatgattatttttatcgttataaatattatttaacaattattgcaacatcaaatggtacatatgaaaattatattaaatggtgtggtatggttgaatcaaaattaagattattagttttaaaaattgaaaatattaatggagttgtattagctcatccatatgttaaaccatttatgaaatcatttatttgtaaaaatcaagatgatttaaatacaatgaatcaattatatggtacaatacaaggagaagaatttgcaaaggataatttagaagagattaaaattgatgaagatacagatacagttaaacttgaagaagatgttcaaaaagatggtaaatttttattacatgtaatgaaattatatattggattagaattagatttacaaggtaaggagaaaaagatgaatattcaagtaccatgtacagaatttgattcaatttgtaaaagttgggttaattatcaagcagatatttgttcattaagtattaaacatgttaaattatgggatttacctaatgatgtttatgatgaaaatgagaaaagaccaataaagaataagaaacggaaaacagataagaatgaacaaataaataaaaagataaaaatggttgatagtgggactgaaagtcaaagtaatagtcctgcaccttcaagtacggggacaagtagtatacagcaacagcaacaacctgggagtagacttgtgaatgaagtgacgaatgataataccaacaccacaaccaacactatggctattccatcagagatataacataatactaatactaatactaatactaatactaataatatactatataaaactcaacatacataacataatatacaatagaaccttttataaatataacataaacttaataaaacatcatcagaatatcagaaaaagctaagataataataataataaggcttgtgaaaatagggacgaccctcacttcccgaaatgccagtttcttctgtttggcccccccagtattatattttgcaacttgtgtaaccatctggtggtgtacatcttcttctggaattgttgtttatagtccatctatctgttaactatgcattctattaaatctaaattgcgtggtatgtatctttaactgtcttgtttatctgattttatatgggaatggcttttactaacatattttaattatcaaattattaacgtattaatattttaatataggaaaaggagaaaaaccatcatcatctaattcaaatccagacaatgtcgaagatatcgatgaagtcgatgatcaaggacaatcaatccttatgggtattatctctcaattaagaccaggatgtgatttaactagaattacattaccaacatttatccttgaaaggaaatcaatgttagaaagagttacaaatcaacttcaacaaccagatattttaattgaagcttcaaagactaaagattcaattgaaagatttcttttagttgttaaatggtatatgtcatgttggcatattgctccaaaagctgttaaaaaacctttaaatccaattttaggtgaatttttcacatgttattgggatttacctgatggttcacaagcttattatattgcagaacaaacaagtcatcatccaccaaaatcttcatatttttattcaattccaaaatatggtattagaattgatggtttagttgcaccaaaatctaaatttttaggtaattcaactgctgcaatgatggaaggtttaacaaaattatcatttacaaatataattgatgaaaaaactggtttaccagaagttttcacattatctcaaccaaatatgtatgcaagaggtattttatttggtggtttaaaatttgaacttggtgatcatttaattattaaatcttcatcatcaaatttaatagctgatattgaatttaaaactaaaggttttatatctggtacatataatgcaattaatggtataattgaagattcggattctaataataaactttatgaaattacaggtaaatggaatgaagttatgactataaaagatttaaaaactaaaaaatcttcaactttctttgattgttttaatgcaaaacctttaaaaccaaaagttagagatatttctgaacaaggagattttgaaagtaggaaactttggttaaaggtaactgatgcattagcaaatagaaatcatgaagttgcaactgatgaaaaatttaaagtcgaagaagaacaaagagaagctgcaaagaaaagagttgaagatggtgttgaatttcatccaaaattatttagagaattaacaattgaagaaacaagtgaatttggtaatgaaaatttagaatttgttatttataaagatcatgcattaaagaatgatttagttaaacatgatttaaataaattttgtcaacatatattcgaaattgcaccaattttacctggtcaacattttgatccaaaatttgaaattcctgctttcgaaaagttaaaagattaaaatattaaaatattaaaatattaaaagattaaaacattgaattaaaagaataatattttgatctttttttatcattattcatttacttatatctacttatttattcgatcccccatttcttttcctctatattttacatttttttatacttttttatactttttatccataaactcttttcatattgtaaattagtttatcatttatattgatgtttttatccttataggtttcgattatatcccctaattgtaacatcaatctttcatcaattcccaacctgaggtgtaattgtttcaacaatactaaaccaccatatggtccaaccattaacacaaaagttttcaaatctttataaatatcattcaaaattggttttaattcatcatattttaaattatcataattgcaaataccaccaaatctttcccattctaacctataatacttgaatacattattttttaagtctaagatactatctaataagaccatccaaatactataatcatcaaatttccttaaaaattccaatattgttataataacttctttccaaacatgtgaattatttatacttgcaataaaaaatctaagtgaattacatgcataataatttcttggatgttccaaagttgatttcaaacaaacttgtataacatattgaagtaatgaactattatcaacattattatcatgtatggaaacaaacaattttttgaaaaatgtccataaaacagatgatttattagttttatcatatgaacaagttaaatatccaccaattgtgattaataatttataattatcactatatcccatactgactattttattcattacagctgtatcatttgcagttatgaataataaccctaataatgcattaatatcatcattaccatctttataaacacattgataacattccaaaaacattctcttcatccccgatttacttaaatagacctcttgaactttcccaatatcatcattaacacttaaaactgtatcattatcaatatcattatcattacttttcatttcattaattatttcatcaggtaatataacaattcttttcaattgataactttgatcattttgtaaaatattaataaaatcattagttatttgtaaacccaattctaaccctgattcaaatgtatcgtttatacccattaatttataagaaaaaagtcattatcaaaagatgcatgttacatgtatgaaccgcgttgtatgcatgttatatcatctaatacccttctcttcttaaaggataatgaattctatacaaatagctggtgcttcacgaccatatacaagagaacatgcaccggtaagtaaatgtatgtattgctgttatattcattctgaagtatcaaatactaacttttaatttcaaatagctgttgaaggatacatactaattataaccaatttacatcctgaaacaacggaagataatttatatgaaatttttgaagaatattgtaaaataagtaatattcatttaaataatgataagcaaacaggatttataaagggttatgcatttattgaaattgttgatttagatgaatgtattgaattgtttaaaattcatgaaactgaaccatttgaaattttcggtaataaattaaatattgattatgcatttgttacaaatgatgtaaatgatagaaagagtaggagtaggaatggaaatattgataataacgatagagatttaagtccaataagacattgaaaactataaaataaactatataaattatataaactaaataataattataattataataaatgattatgattataaactaaattatgttgaattaatcttccatttctgaaggttttaataaaccaccaattctacttgccttttctctatgtaatctttccttttctaataattcttcagctttatcatcagcaaataaataatcagttggatcaccaccaatttctttaatttgaactaagaaatctcttaataaaccactaaatttaatttcattatcaaaactattaaataaaacttgtaagaaatttgaaacttgttcagtttgtaattgattaaaagcatttattaacatattacctaaatattctttaaggaaaactgaatttggtgtaccttgaggtgcactatcagatggataaattgtttcagttattttattattaacaactaattctaacattttagataataatttagtttgtaatttaaaacctgccttatgatcactatcagttaaaacatagaaaacatcacttattattgggaaataataatgtctataaaatccaattgcaaattgattttgtggacctaatttttcaatattaattaataattcataacataatgttaaacctgaattttcaacatctctattattatgtttaaatgcccataaaattgcatcaataaatgattggaaagattctggtgggaattgtaataatgcattaaaaccttttaaatcaatttctcttaataatttataaaattcaattctatgttcaggatattcagtaaaatctttattaatcatatttaatgtacattcaaatacatttgctaaaattaaaacaatttcatttggaattaatggaccaactttatcaactaatgttgataaacaatttaaaacttctgcatcccttgcatcaggtacattatttttataatcatttaaaattgttgctaataaatttggaactaaatctctaacaacttcattatcattatcagcttttgaaatataaatttctaataaaattaaaatttcctttttaattgttctccaacctctaacctttggagttttagttgcaattaatccatcatttgaaacacttgttgaaattaattcactaactgctttatataatgataacatatcattataaattaaacctaattgataataaaaatttggtcctaaaggtttacaaactgaaacattagttttcaaaatatttgcaataattttaacaatttcaggatttgataataaatttggatcttcacttgattgttgaacaactgttgaccaagcaatatttggtaatttcattaattctgataataatttatccctaattgattgattattttgagctgaaataattataccacaagcttcataaaatgtatgaacttgttgaggttgtaaatcagatgttgtttcttgaatattttcaataatttcttcaataaaaggttttaattcaccactttgttgaataacaaaatgtcttttacatttttcagtaattttaataaaagtatcacaagccatatcttgaacaccttcatgggtttcatgcataaattcaaataatttattaacaacagttttcaaaaatttccaatgagctcttaaaaatcttggatattgaccaacaatatacattatatttgatgcaacaactgctttattatctttacctcttttcatttcagttaaagctaataaatcttttataactaaaactaaaaatcttttctctctttcttcatccattgaaccagaaattgaaccaattgcccaacaaagggtattaatattatgccatgaccattcagaaccatcaatttgatttgctaatttagatgacataattgattcagtatcattaacatctaaatgagttaaataaactaaaacttctctaattgatttatataattgaattgtatcactttctttaacaaattctctaacaatttcaccttcatcattttcaacaattaaaacttcttcaggtctaaccatattttcaatcataacatatcttaattttgataaaatatcattataaagatttttacgtaaattttcattttctatattattattattatttgaagaattattattattatattgtaattttaataaagcagatgaaccctttaatgataaattttgaatttctgaatataaaccattaactaatttaacccaataatcaagacaagttttaaataattctctttcatcaattcttgataattgaattaaataattatgagcaattaaattaatattattaaattgttttaaattttctaattcattaagatgatttgataagaaagtaactaagaacattgctaaatcttgcataaattcttgatcatttgaagaagcaaatttataagttttctttaaatctaaatcaattggaattattttagaaattgattcaattgacattacaaacattgaaacaaatttttcattatattgaggagcaattaattgagaaacttcagttaaacatttaattgtaattgatctaaattgatcaattggtaagaatttattagttaataaaggtaataaattagtttcaaaattataaccaacaggtatccaatgaatatatttattaagacattgtaaagtttgaataattaatgaatttttagttgctttatctaaaacttcaatacaaagttggaaaatttgttgaaattcatttgccatattaattttcaaagattttgcctttgcttgagttaattgatcatgagagaaatcaataatttcttcacttaataatttaaggataatcatattattttcacaaacattaaaacttgctttacttgattgaataatttcaggtataaaatttggccaattttgaggccaatcttgtttaacaatttgaactaaagttaaatcacatttattaattaaaggtttattattaataaattgattatcatcattacacattgaaataatcattgaagcaataaaatttctaatacctaatttttgatcatttggtaaaattttccatttagttttaataaggttatttaaaattgataaagcaatatattttgattcactatctcttgaaaattgtaaaattttatcagctcttgtccaagcatcaggatgatcttgaaatttagttaaaagaatttgagcttgcttttgatcatcacctttccccttatagaaggtctccactacagtatccaatagggagacatctagatccttggagaagtccaatattgagtccatagttgccattgttttagaaaaaaagaactaacccttataaaactaaattaaattaaacatgtcaataatacttataatagatgaaacacagcgaaaacgaaaatattttacttttactattactatttatacttactatacaaacaattggttactctgtttaacaagtctctctcttttacttggtttacttggtttattagatgtcttggaggtagtattagtactctcactaagcataccctgtattctagtattctcctcaatgatactgtcattgaattcctcagaacttattcctctaagtacattctcatccatacatatcttacctaatttacccattctatattcctggattaaagtaatggcactacctaaataatttggtttccaatttttaccaattttacctgcattcttcatttttttactaacagctgttaataattcataaatatcattagttggtgtctttaaatattttttgaaaactttatcacttttattatttgataaattaacaatatataaaagataatcagctgcaattattggatcaatttcattatgatttaatgtaccaattaaataaagtgataaaactgttttaatatcatttaaatgtggtaatgtaactccaggggtatcatataataaaatttcaggttctcttgatatacgtataatttcacttgtatttcttgtaacacctggcatattaccagtttgtgcaacttttttaaaactttcattgttattaaaaccaaatttccttaattgattaactaatgttgatttaccaacatttggcatacccgttatcattaatcttaatcctaatggtggttgaggatataatttattatgataatctttaagtaatttaattatatttaaaacatcagatttcttatttgtatcaattgaaataaatttttcatttcttggttcatgccatttatttaataatgatttaggtattgtaaacatatcctttttagtataaattataattctatcctttgatctaaatatattctctaatatttgattatttgaagatattggacatcttgaatctcttaattctaaaactaaattaatttgaggagataattctcccatacgtttaatagccttagattgatgtcctttataatgtgctaataatactctataatcggggaataccgtacgtggtacaaacatttatgtgtggtatgatagaagatataactatatatatattgtatgaatattaaatcataaaagtgaaaaatttttataatttttttccactatagttatagttataatgatctttttatatttaatatatatcactctttcataaatcaagtatgccattaatattattttgtggataccctaatagtggtaagagtgattgtgttaattcacttaaagaagtattagaaactaaattagatgaatcaccatttaaaaatattgaaattttaagtgatgaaagtattggtattaaacatgaacaatataattcatcaattggtgaaaagcaagcagttgctgcattacttgcatcagttaagagacatttaaataaatcaaccatattaatagttgatacaatgtcatataatagaggttttagatatcaattattttgtgaaagtaaagcattatcaactcctcatgtagttattcacgttgtttcacaatcaggttataatgataaaacttattgggataataatttacaaaatgctttaattgcaagatttgaggaacctgatcctgcaaagagatgggattcacctttattaacattatctaatagggatgatataccatcaattactgatgaattatggacaatcctattaggtaaaacacgtcgtcgtattgaagcatccaatgcaactaaaggattccataatactactaatttaagtgccaattatgttcaaatacttgatcaagagacacagagtgttatcaaggacatgctcagcagtgatagcagtgacagtacctcttctaccaccaatatatcaccagctacactgcaaagacacagaagagccttcgtttccctacagagagtacgacctgtcgacgtggacagaataaagcctctctttctcgaatacttggaaaaagctttagatttataattatggtaatatatagctctgtatacttcctttttatcaattaaaacgtcctgtattaggggactgtatcaatgaatatatcttcaaataacaatatattacatagcaatactaatagtaaacgtcaaagactctctcattcaaattcaaattctcaaattactttaaagagattaaaacagtataataatattaatattaataataacattagtaataataataataattataataattataatagttataataataataataataatatcaatataaacaacagtacctctccagtttctcaaatgtcttcaaatattacccccaaccctaatatcaatacaaatactaatacaaatagtacaaatacaaatacaccacctacggctagaataatgtcagaggaagaacaaatacttataataaatttacaggaaacttataaatcaatacttcacttggaaattgaaacacaaaattcttgtgcaaaaattaatcaaaaattaagagaaaataatgcaggccctgaattaaataatgaattatggtcagtttataaacaaattactcaattattagataattattatgatttcctattatatgctttatctccaacttcaaaatctggtaaacctttagtaattaattatagaattttaaaaagaatgtgggtttatggtattgttgcattcttagaagttttaaaatcagttatttcagtatttgtggaacatgaaatttgtgcttgctttataaattattctttcaatataatttcatgtttaatcgatcctgaattaggtatagaatcttggtggtgtgaaaaattaggtgatttaagtagaatggcaattgctttatatcctgcaagatatatggattggaaaatttcttcaatttattggtataaagaatcaattaaaactcaatttggtcatggaaaaatttattatcatttatgttcagttgaaaatgataatttaaaagctttaatgttaattggtaaagccgttaattgtagagatccatttgttccaacttctcaatatttaagaatgataattgataatgtttgctcagagagaaatatgttaactcatatagaattatcaatgattgattttgttaaaattcataaaattttattattaccaaattataatataaatgatgaaatgattaaaattgtatctcattattcatcaaattttggaattgataatactaatatagattttttccaaattagattagattgttcctcaattgatattaatgaaaaagttaaattttggtttcaaaaaggtgcagattttgctttatcaaatatttatcatttattaggtttaggtttagtttcaaatccttttgctaaattatttgatttaccaattgcacttaaagaacgtaaagataaaaaggatagaagagataaacgtcgtaataaatcagatgatgatgataacacaaatacaaatacaaatacaaataatgatcaagaatatgatgatgatgatgatgatgatgatgaacaattcgatataaatgatccaaattttataacaaattcaactgctaatcagttatcaaacgatttctggtttaaattattgaatgaaactaataaaggtgttatcgaattatcaatgaaaatgcttaaacaatacctttcaggtcctgtacaaacttcaacatctcatgttataatttggatgtattttcttgttagtgttttaaaatcaattgaaatttatccaaatgcaaaaccaatgttttatttacttttaaaggcaatatttccttggaaaattttaattttatatttaaatgatttattatgtgttgtacgatcagtacctgaattaaattcaagatataaattattattaaaaaaattatatccaaatttaatttttaattattttaattcaaatgaaactttatgggaagtttggaaatgttggggatctctttggtttgatagaatttcattaaaattagattatgataatgttttccaaactggtatcaaaaatgatatttttgatactccattatcaggtgaaatttataattctcatgaagatggtgaaagatatattagaattttattattatctaattatatttgtcaatcttcattaaattttggtttaacaatttcagataatatttttaaatataatccatcaattaatttaaataataatgaaatttcaaataataatttacaaattttcaatagttttgttaatgattcaagaataagtcaattgattaatttttcaggttttaatattaataatttaaatgttaatacaaatataatatctgataattttgatataaatatttggacaaatgaaaatattaatccaaagttaccaatgtgggatcataattcttatggatttatgacagattatatcaataatcaatatcctgctgtattagctcataagaaatccaataataatagtaacagtaataataacaataacaataacagtgcttataacaacaacaataataatcataatcatactcataataatcaaacaaacacagaggataatgaacatgaagaagattcagacttatcagatgatgaagaatatgatgatgaagatgatgaagaggaagatgaagaatatgaagatgaacaagatgaaaatattaataataatagaattaataaaaataatttaaaaaatactgaagttataagcgatgttgtatcaattagtgctaatataccattagatcaaatgactgaattatcagatcctggtaataataataataatagtacaattaataataataatattgataaaaatattgaaaaaatgagaaattctaataaaaaaattattataaaaggtgatattggtgaattaagtgatacatcaattacatttatttcattagatacaaatgtttggttaaaacattgtggtaaaatttttaaatgtgttagatcaagaattttcaaattagctataccattaacagttttccaagaattaagatcattaagaaaatcaaatgatagtttagtagctgaaagtgcaacaagagcagttataattgcaagacaattatatgctgaacatgttgttttagcaattagatcagatggtacaactgcaactaatattaatgaaacaagagaatttgagaataatgaaaattggagacttaattctgatgaattaattttaaaaagtattaaattaaatgatgcatttggtaaaaatttatgtttaggatatggatattcaattggagaattaccaaatttaccaatttttgaagaaccaggtaaaattactggtatttataatggatcatatcaaggtggatattcatataattattttccaacttctaatccaaattctagtagtaataataataataataataataccaatggaaattacaatataaaggatgaacaagaagttgaattaaatgatcaaattaatgaaattttagaaactccaagtaatcataaaactaaaaattggaattcaattaaaaattctgattttaatacaatactagttaatacaacgggattacgtggtgaatcaactagaagtttatttataagttccaaatcgaaagttttaactaaaattgaagcaacagaattttgttataatataattgtttcagatgatagggatatggcaattcgagcacaaaatattaatttaaagatatttacatctgaccaatggtttagattagttgaaaaaatatcatttggtagatgttataattagaataaatacagttcagttcggctctacttggtgatgaaataagtgattccagtatatcggagtaagagagttcatttaatggagataaaaccttaatataagggaaatttttcggttttactcgctcctgattttgccttcccttttaggaaactttgaaaatctatctcatctcttatcagcttattgtgatttatgccaatgtttcctatctctgataagatagatagatagatacgatgtatgattattttcacacctgtctcttattaatataaatatcactatatacctctctactgtaatcaggttttttattattctctctatatttatattaattaacattaaaaatttatttacctttattaaacaagtaataatgactgttggtattcaaaccttatatcctaacccacttaaatctaacggactcgttgaatcttataaaacttattgtcaagattataagattcctgaaaagacacgtgaaaatgaaattaaatcatttgtagaaaaaattgagaaaactccaggtttcaacccaaatttaaaatttgatccaaagaaacacattattttcaatactgaagattataaaaaaactaaaacttttacattagatgagttaaaaataaccaaaactcatattgaaccattgaataattttggtgcagctttcccatttaaattactttcaaaagaagctgttaatatgcttttatgggaagctttacaacccaatgttatcgaagaacatgcaagattaccaaatttatcaaaaaatgcaactagattagatttccatattggtaatcatttttcaaaatcacaatttacaaatgatttagccagatcagatgaattatctgaaattgtttcaacatttgttggtcataaaatgaaacctgtttgggatatggatttagttcatattaatgtttcattagcaaccaatgatttagatgaagaattaaataattatccacaatctcaaaaggaaattgatgaaattttaaagagacaagatgcaagtgatggacaagatataccttcaacattaggtgttcattatgattcaatttcaattccactagttataatgttagatttaccagaagaggcacaaggtggtcaaacaactattattgctggcgataatactgcaactagagtacctgaacccccaactggatcaggtacattaattcaaggtagagttttaagacatttagcatcaaaacctgtaacaaatcataatagaattagttttgttttaagttattcaactggtgttgaaggtgaattagataattgtgttacaacatcagttaaaccatcagttttacctaaaaatgaatataatcaattttatagagattgggttaattataaattcactaaattggagaatcatttaaaatttattaaaaatcaagttaatgaagattttcaaaatggtttaggatttgatcaagaagaatttgttgaaaaatgtttaaaaattgaaaaatatttcaaaggtatttatgaagaaatggaatgtgttgataatcaaccatatcctccaaaatacttcaatattccatatgatgaattataattgataataatggtatttatttatttatttatttatttatttatttatttatttgtttgtttcttttactgttacattttcactccctttattgctttttctccaaaatatttccctttcctttttaatgatttataactaatacgaacaccgattgaacataaacattaattcagtaaaaaaccttaaatctaagcctggtgatgttgaagtaccaagtttgctacccttcccaatgcggcaataccgtcacagcgggaaattcataagtttcttccgctgtgcaactggtggcttagcttttttatatttacaggcactttaaaagtataaaacatctacaatatccattaattaacagtcttgttaatccaagtagttcttagcctttgaagtcttgtaacaaacaaactcaacaaacatgctcatattaagtccaattgtaagattactattctttgatgatgaaatgtacagaagaagacgattacgtaagattagaagaagaagaaggttgggattgtacagaggaagttacgatattgatcttgttgaaagtcctgagaatccacttatctatgtacgtgctcctgtatgatattaagtactttatataccttattttatacctatataacataataatataatctaatcaactgctattaccaatacccacacccaccgaaaagagtaacttaatgagtatagaatataaaatatgtcaaaatgaaaaaaaaactcaaattttcaacactccgaagataaaatataagccccgatttcctagcaacccttattgttaatgtctttttgtcggtctattctatctattgtctttccataggcttgaacaaaggatgttcgaatctcagtataattaacaagccactattggaaacgttctttcaacggttatccaagtggaaatatttggtgtttatccaccctttttcaactacagtaattacttttttaatagttcggtaacttctctaccaaagcctcttatcatggttcactgttgaaacatgtatataaaagcaatggttaggaacaaattattatgtcaaggaactattaaaaatgtatttcaattagacatcaaacaatcaaaggaaaagattaattaaaaatgtctaccaatccttatgcactttatgtaccatcacttgcgagtggtattgcttttgttactgttttcgcaatctttttaactttccatttattgatctctttaagatatttccaaagaagattctttatttattggtcttttggattaatttgtcaaattttaggatttgcaggtagaatttggattacaaagaatgattttaatgttagtgcacatattttttcatcagtttgtacatcattagcaccaagttttttccttgcaggtttatattatatttcaggtgaagttttcaaagttttcggttctgattttatttatttaaatattagtttaattttacttattttaaaaatagcaaatgtcacagcaggtattttacaaggtgttggatcaggtttaattacaaattatgattctttaaaagttggtacaaatgttggattagatttaattgttgcaggtttagcatttcaagttttaacattaacatgtttccaaattctttggtatgttttcatttataaagttagacaatctaaacatcaatttaataatgaaaaattcgataaaaattatcaacatattacaagtaagagatcaatttattatttatttattacattttcatttgctattgcatttatgtttattagatcaatttatagattaattgaaatgtctgaaggtttactatcaaaacttgcaacaaaggaaatttattataatttattagatggtatgatgattgcattagtttgtttagttatttcaattattccaccatcaattttacttggtaaaaagaagattaatgatattgaaggaaatgatatcgaaagaaatgataatgttaataaagaaagcaatgttgaaagaaacgttggaagaaatgttgattcaaatactagtgtcgatacaaaagctaatgctgataatggaaaccaaaccagtaatttagatgtactagctaggtattcacttcttttcagaggtatcagacacattattaattccaccaaagaatagtttatcttagatacttaatgttactccccatttataatacttaatacttactacttaattacatcacttttacgattattctgcttttgtgacaatctttaaatgatttttctaattttattagtgtaaaaggttcattgtcctctaaaagagaataaataaagtaatttgaagcctaaaatttaaaggtatctacttataaactaaaaacacctgttgattctagagttataagggaaactgttatttccacctgttctgcccaaatcatttctccatacaaagagtatttcatcttatttttcacggagttttcacaagaagttttcacggcttttaccgtgcgaccgtttcaccataacaatttcttacttttcatagaaaacgtatttgataagtagagtattcaactatggtggctgagtttgcagtttttgtgtttttaatatcatttttttaaatactaatcaattgtcttttaattttacaacagaataacataatatacataatgaacgaacaagaagcacaaactaatcttgatcaagatcttaagaattctaggtttgctaaatacaacaatcctcaattgcagaaagatgttaaaaattggatactttcagtactaggtgataaaatagataatcaagtatttttaaatactgatttactcgatagtttaaaagatggtacgatactatgtttattagtaaatacaatatttggagatgattgtataaaatataaatcaagtaaattagcatttgttcaaatggagaatattgaaaaatttttaacattttgtaaaattaagggagtttcacaagatgaattatttcaaacaattgatttatttgaaaaaaatgatccttatcaagttttaatgtcaattcaatcattttcaagaattgttaataaaaatttccctaataaatataattttattggaccaaatatttccaaaaaacatgaaagacctaaaattccaaataaaccaaaacatctaatgttaggtcaaggtggtgttccttggagttccattgaatatggttatatgaatggaagcaatcaaactaaggaaggagttgtattcggtagtcgtcgtgatatagtacataagtaagtaaataatcaaatattattatatattatactattatataaatgtaatgaattgtaaattatctaatgaaataacattacttaaaacattttctaatctaaattctttatcaatatcctctttacttttattaaaatctttaaaacaaactaaattaattgaactacctagttgtttcaataaatggaaaatactatcttcaacacttgtttgtaatatccttctttgattaatttcatcaatttcaaaataattttccagatctttaaatgttaaaccagggtataatataattactaaatttttataattcttcaaataattttgaatatcaattccatcttcatgattctcattatattcactaattttatctaagactgttttagatataactaatgaaatactcgtatcttccttttgtttaaatttaagtggattactatcagtttcatcaataattgaatcctcatttctattctgatttataatttgtggtgtaaatgatgataaatatttatatgttccataagctgcacctgcaattgcaattgatgcagttattaactttaatgtagtgttattagagttgtttctattaggacgattactcattgtctttagtacacagaacaaaaagaaaagggaagtgttagaatcaagttaaaatgactgatttgatttgatagtgaggaaatttaaagtggattttgcttaaattgctaagccgcctaaatgttataaaaaaataatctgtttttcttcatgtgtttgtttgtgtgttaaagctatttattatgttatgtaaatatgtagtaaatattgtttatgtaatgttaattgtatgtacggttactatgctagatagttaatcgcatcagcaatatcatcatcagttatctcttctttaataacaggtttaactttctttttcggagtttctgtttcttcaattacaagtttttctaatttatgttcaatatcttgatcagttaaattacctctcatttcttgatctttctctaaaacttcaaataaccctttaaaattacctgcaccaaaaccattatgatttgatctttgaataatttcgaaaaagaaagttggtctttcaaaaattggttttgtaaataattgtaataaataaccattttcatcaaaatctattaaaatacctaattttttaatagattttaaactttccttaatttttggatgtttctctaattttaattttttttcaatattttcataataagaatcaggtacattaataaattcaacaccagaatctttcatttttttaattgaatcaattatattatcaactttaattgcaatatgttgaatacctggaccattattaaattcaataaattcttcaatttgagatttttttaaaccaattgcaggttcattaacaggcattttaacaatttcattttcagaagccataacagttgaatgaagtgcagaatattcagtgaaaacttgattttcatcaactgaccaaaatttatgaaaattaaaataatctttataaaattgacaagttgaaatcatttgatcccaatcttgattttgaacacaatgatcaattgatcctaattcaattaaaggttttaattgaaaatcatcattaattaattcataacctggtaaaaatcctttataatttgatctatcaataattgtatgaattgtatcatttataccattaattgtaatatattttaaagtaccaaatttatcatttacttcagtaattttactataacttaataaatcattaacttcattaataagtaaatgagttgaatttttagaaattaaattatccacaattgaatcaaggttatcagatttaaatgcaacatctttaacaccatcaccatgaactgcaatatgatgatgaatactatcaattaatctatttcttggttctttatgtaaaggtctaattacaccagttaaaacaaagattacattattatttttaatgacagttgaagaaatatctcttgaaccagtttctaaacctttataagcataatgtttaaaaccgaataattttacaaaataatttgctaccaattttggggaagtgacatagaaaactatatgatcaaaatctttacaaaaaggattagaattggtattagaatttggattaatttcaatttcaactgtcatagtattagttattataatttattacagcaaagatacgttgttgtataaaagagagaataaagcaaaagaaatgaaggcaaataaaaagagagaagtatatgaaaatactaatataagcgcatatccctctttatatgcctatattccacattccacattccccactcaatatcaccatcattttatgtatgataatgcatatttactacaattgtaatcatctactaatatatgggcactcccccacaataactgttatttaaatcttgttgtagtatttgtaattttattaggtataaaagaagatgattcccacaaaaaaataattttatacagattcgaatctttttattaagattattttttaatacccaacaaaaataaattttattgttgagtattatcattattataattacttactataacgttttactattatcatctctaaaagtcaatataatactacattataaaatcaattacactcacacttattactcttattctaacgactattacattacaagagtatatatccataacatactttaacgaaggaaatataaatatattcaacgaataaacctaatttttaaagccgtgtaaaaaaattctttcgggtttgacacattttccattttccaaataaatttaaatttaaattttccattctataaagaagattttatttccaattttttaatacaatcatattaattacttcatttattaaacaaataaaaagaaataattcaaaatgagtagtgcaattgctgagctgattcgttctcaaactggtggtgccgctgatggtactggtattgttaaattacttgaaatcactaaaggctttttacatatagatagtactagtcaaattcctcaatttttagttgattacgttcaagatcaacaacaatctcaatttggttcttatccagatcataaagatattgctccaagtggattatttttagcaattttcgtaattattgctattgctcatggttctctattcacaattaattatatgagaggtcatagattttggctatcattaggtttttgcttttatgcaactatgagatggattggttttgcattaagaattgtttgggcaaagaatatcctgaaacttcatgttggtattgcttctgaagttttacttgttttaccaattgtctttttagcttctttcaatttagttttagctcaaagaattttcacttggaaacatcctgttttcggtaatacaaaaatcttttggtatgctatgcttgctatttattcagttgttattgcagttgttactatgacaattgttgcaggtgttgttccttacttatacttcctttcacgttctcattatgatatgtgtcgtaatgttgttaaagttacttcaatccttattacactttattcattactatccattgcttttgttatcatgacttatattgttccaacatctcaaagtgataaagatgctttagtttatcaaccattttggattaaatcattctccccattttatttcccagttaaaaacgctcaatctgaaggtgaagatattttcgttcaaagatatcaaaatgatgcaagagaaccaaagagaacaattgttggtggcggtttagatttaagtgaattaaatgaaaatgatgaagttgcagaattaaatgaatttgaacaagctggtgaacaaaaattctctttaaaacataatatttcagttacaattattacaattacatcagttttcgtctttattggtgcattatttagatgtattgcttgctttattgatgatacttttgcttctcaaagttggatttatgatccagttgttatgtatgtcttgtggggtgcattagaaacaatttgtaatattctttatttagtcggtagaatcgatttaagattttacagaccagataatttcaagaaagagaatagagaaattatattatctgcttcaaagactgcaaatagtgattatcctgaagctaaagaagctgatttagtttcaagtaatcaaagttctcaaacaagagtttaatccatcaacatcctaaatcataatttatttctgtttatatttcaatgctatcatcaatttaatctaatacttaatcgtttcaatttaatcaactatttaatttgacaaacaacaattttttctattttataaacacttctttatttaacatatttttattttaagtttatctaatgttaattaactttttcttctatttgatattttcatttcctttcttcattgtcttagtttttcactctatttcctctgtgtatataataaaattaacaagaaatgaaattttaaagaaaaagaagaaatatgagggacggggaaatcagataatattattctattgaactgagccttaaactttcttttattgggttattaaataacaatgagtagtttattcatacttacgttcaattgtgccaagacacctccaattaatgaacacttttataatgcaattgagagtaaactaccagaaaatatctcagatctttacgtttttggatttcaagaaatttcatcaattttaaaaagtacaagtaacacaaccattaagaaactactacaaaccttatctgaaggattgatatcaatattgaatgaaaagtacgataatttgaattttaaaaatgtacccgttgttaatataggtgcaattggattgataattataaccccattctatgataaaataaatcaaatttataattctataggatatccagttggtcatctctatactacattgaaaggtggaattggtattagaattcaatttaataatattgaattcacatttgttagtatgcatttaaatgcaggtgaaaaattatcacatattttaagaaggaatagtgatttatttgatataattaataatttatcatttgaagatggttggagtgtacttaaacctaattctcattgttttatattcggtgatttaaattacagagcaacaaatgcacatggattagttgattgcgatgagggggatggtgataatgaattacttaaaagtgatgagttaaacttattaaggaaagattcaactatacttataggatttgatgaagcaaacattgatttcaaaccaacatataagagagtaccagggagtggaagttttaaatcaaatagaataccatcatattgtgatcgaatattatatcttgaacattcagatgaattaaataataataaatcaaaatataaagttattgaatatgattcaattgaagaatgtaaaatatctgatcatatacccgtttatttaaaaattgaaatacccaattcaacacctgatattaatttgaataacttatccatacagaatagattattgttaaagaaaaatagtagaataatagtgatatcgaatattacaacatggttaatgggtacagggatttatttaacaatgactaatcaaggtagagtattgggtattacactaagtatattactatacaaagtctttgtttaatcataaatatttttaagtttaagttaaagttttaaaaaaaatatacaaaatctatactatataatgaaagtatcacatattatactcattttgaaccatatttcattttaccaaaatcgaatgggatatatttatatttaagcatatgttgaatttgtcttctcattgttaaaaggaataaaataatgaaataagcaactaaaattggccaaaatactggtatatcaaaaaccgagaagaaagaacataaaattgcaattgaagttgaactaacagttttcatccaaaatttaaattcaggtaatcttctaatgaaaggtttaaattcttcatcattttcatccattttaccaacacctgattcaatattatcattttcaatatcttgttcaattgaaggatcaaattttggtgttaaaaatttaaggaacatatttaataagaaaattgcccatgtataacaaactatataccaaccttcagcccaaacaatacgtcccatgaagattaacattaataaataagctgcaatccatcttggaataatatgaggtgtaacataatctaagaataaacgatattgaacctctattttatgtctataaatatcaaaacttgaactctcactctgactatcttcaaaatccattatattaagctcaattgattcatccaaacaaacaaaagaaaatttattccaatgtataatgaatccttaatgtcatcaacacaacaactgtgatcagagactggaaaatttctcatgtgaggaacacaacatttactttgtcatgggtgctgttctctttctaaagtactttactactgtttcttaatactggcaatgaatgattgaacgattgcaggtttatttggagacaaggtattccattctcaactgtcttgacgatagagctgatattgctacttttactttcccctctcattctgcatctgtcaattcattatcactagacccgttacaacatagattcctcctatcaggatctgcagattcatcaatcaaattatgggatttgaatgattcaagtttattcaaggatgatgatagaatacatgagatagattataaacctagattgaaatattcacctatttgtgtattaccacagaaaagtgttcataaatttggtgttactaaggttaaatggtggccagataatggtatgtggttatcatcttcatttgattttaatattaatttatatgatacagattcaatgcaaattgtacattcatttccattagattcaagaatattggattttgatttcaatccaatgggtaattcatcaactgttatatcttgtaatgatggtggtgttggtggtttgaaaatgttagatttacgtacattatcggatactcaaaatttaggtggtggtgggaaaattaaaggtggtgtaggtttcatgtcaagttgtgcttggtcttcatttaatgaaaatctttgtattggaggtggtaatgatggttcatgtttcggttgggatattagaagttctgataaatatttatttgaattcgattcaaatagaacttcaaatagtattgaattaaatcaattgaaaaaaaggaaatatctaacaaataaagcacatcacgccaatattaattcaatgattttcaatgaaaatggtacggaattaattacaattggtaatgatgaaaagataagagtatgggatatgacatcagataaaaaaccaattaataaaggtataaattttggtccacttatacgtaataagaccaaacaacatattgaaatgtgtcttagtccatcattacagactgaaatatcatttctttgggtaccctctgatagtggagaagttctagtttatagagttaaagatggctcattggttgcaagacttaataaacaaaatagatcaatatatacggaatcatcaacattaaatgatactaccaaaatatccaattctcctgatagtcgacgtgcattcagtgtaattgcaggtagtgtacaggaaccaagatattttagtggaggaaaagacgggataatttctgtttggggagatgacactacaaaactactacccactcatcccatcgagttcaacaacggtatagatgaaccagtagagattgaaatatggtaaagagtaaaagaaaggtattaaaaaagaactgacttgtcactacaataatggaaaaaaaagtcaacttcgctgttaatgaaaatggatttggttgtaataccattttaacatgttttggatgctcatctttcttttcgtaaattgtatattacaagcatatagataactattgatagaggataacaatgtttaaactacaggttgtaattatccctcagagtttggcatcttctgatttgaatttgccttcatctattggaactccaaatcccgtattatcactaacaactgataatttagatgaaaataatgatcatagatataatcaacaatcagctcctttatttgatcataatacttcttatgcaatgaatgtaatgagtactccaatgtatttaaatagacctcaatattcgaataatttctctcatccatttattaattataataataacactaatggtaataataagagaattaagaaatttttacatattacttcagcaaataatccattatccattgttgctcaagaaattaatcaaagattcctgaaattatatcctgatggtgaacctttacaaattttgaaaattcaaaatattgaagaatgtgatttagatcctgattatacagtttcaatggttttcgatacaagtaatatttgtcgtgttattgttgcaaatgaatttaatgatgatgatacttcaatgttaattaatggtaaacgtcatttaactggtgatttgaataaagttatgaaaaagagaagaaataattcatctaaaactacaataaatcatgatgattcaataattaatacttccatttgggcctttgatgataataataacaattataatgataatgttggaaattcaactaataatcgtcatcgtagtaaacaattaatgaataaaccaattggtatgacacaaccgtctgaaaatccaaatatttcattagcaattcctgatgttgatgatacagttattcatccagcaaaaaagggtaatttgaaattagcttctccaattttagcaactggatcaccaactagaattacatctggtatgttaactgttaattctcaaccaaatttatcaaaagttgattatgaggaagatattaatggttcaatgtattacgaaaatgaaaatgaaagaggtagtgttccaactaaatctgattctccaaaaagaaaatcatctaaaaaatcaactaataaaaaatcaaatgatattttaaaaaatttagatactaataaagatttacctgttatggatgatgttgaaaccccaaatacttcagtacttgttatgaaaactccagaaaataaaaaaacccctcttccatcaatgtcttcagttccaaatccatcagacaaagaacaagcgaaaaagattaatttagataatagtactcctaataaaaaagctgctaaaatagcaacaccaaagaagaaacagtcagagaaggaaaaggaatcagaatcccaaccccctgctctttcagaaaaggaaaaagaagaaaaagctgctaaactagccaaagaaaaggaagaaaaggctgcaaaagctgtacaacttgttaaggaaaaagaagaaaaagccgctaaattagcaaaagagaaggaagagaaagctcttaaattagctaaagagaaagaagaaaaggcagctaaacttgctaaagaaaaagaggaaagagctgcaaaagctgccaaattagctaaagaaaaagaggaaaaggcagctaaacttgcaaaggaaaaagaagaaaaagctgctaaacttgcaaaggaaaaagaagaaaaagctgctaaacttgcaaaggaaaaagaagaaaaagctgctaaacttgcaaaggataaggaagaaaaagcagctaagttagccaaagagaaagaagagaaagctgctaagttagctaaggaaaaggaagaaaaggcagctaagttactccaagaaaaagctttaaagactgctgagcttgctaaagaaaatgcagaaaaggcattaaaagcggtagactcaacaaaggaagatagtattgcaaaaccagtcgaaaatgctactaaaaaagcaactaacgccaaatctgatgataaagcctccaatgataaatctaaaaaatctactgaaaagcccgttgaaaacaaggacacaagtaagaaaacaatagaaaagccaaccgatgcttccaaacctttagataaggatgcattaaaagaacttgctgaacaaaaagctaaggcacaaatcgaaagaattacaaacaatttaatggcaaaagctgcaacatcatcacaatcaaaaactaatgaaactgtcaaatctacacctgataataaaaaaagatctgctaatgaaataaaggaagctactgaaactccatcaaagaagacaaaaaaagttgttacaactaaggaatcaaatacagttacaaatagaaataaaggtccaacatcagttagatcagatgatgaagatgctgatgttactgcaattagaaaactaaccactgatgcaactccagatgaagaaattcatccacatcctactaaacctgtaaagattcaaaaaattacagtcggtggttcacaaacttcttctgtatcatctcaaagtaaggaaactccaaaagtaacaactcgttcaaagaatacagcaaaagaagttgttgctctttctgatgaagattcagcaactgatgtagacagtgattctgattctgacgatgcaagcgctaaacctgctgttgtcaccgctccaaccacaaccaggaaacctaaaccatctgtcaaacctgctgcaaaagcaacaagtaagccaacgacaactgacaaggaatctgcgcccgttgctaataacaaaactgctaaaccaactgaaactgcaaataaagcaaaggaacctgtaaatgtacctacaacaggatcacaatcaagactttcgagtttaccatcactttcaactatttttgataaaaaattaccagagacaagattaaagaaaacacaaccaaagaaacctgaagtaattggttctgaatcatcagaatcatcagattcttcatcaggtagtgattcatcagattcagattcagattcagattcagattcagattcagattcaggttcagattctgatagtggaaatgctaaatttatcaatgccaagagtgcaggaaaatttatcagttctaaaagttcaaagaggaagggtaagaagaataaagcttttagtgctctcatgaaagattctaagaaatagattccaaactaaccatttatattagactttgtattatcattattgtattgaattcccaacaacacatcatgtataattttatgtaatttatattaattttactttgattattagacaataatatcagctatacaaattaaaaaaaaggtcaagctctatgttgatcttcaacgaaatctaatgctctctctgcatcaatattacttattgtactgactttattattaaacataacaccataaaatctatcactaactttcaacatttctgatctaaaagttgtacaaataaattgtgcatctttagataaagatttaattaaattagcaacagcagttctatattgtgcatctaaatttgaatcaatttcatcaaataaataaaatggtgcaggatcacaactttgaattgctaaaattaatgataatgcacataaagatttttgaccacctgataattgttctaatctttgttgttcatttttcttagaattaaatgaaacactaattgaaataccaacaaatgaatcaattgagttttcatcatcttctgattcatcattttctgaatcaattccttcatttgtatcaggatattgtgataatgatatagtattattttttttctcttgatttttcttaagtataataagtttacctttaccagcaggaactaatttttcaaaaattttagagaatccagtagataattccttgaaagatctaataattgcttcatttttacgattttgtaaaactttgattaaatgttcaattgataatttagcttcatctaattctccaagtctttcagataatgaatctctttgtttagcaaatttagcaaattgttctaatgctttcttattaacatgactatattttttcaaattttcatttactttagttaatttatcagatagatatgatgttgatttatcagcatatgctgttaatgtatcctctggtaaaacacctaattcaccaatatttctctctaattcatgttttctatttttcaatcttaatctttgaacaagatttttatcagtatttttaccaacatcttcaaattctttaataaattgttcttgagcttcagtcaattcttgtattcgtgtattattaagttcaatattttctttaatttcatttaattgattattcaaatcattttcaaattctgttaattccttggatctttcatgtaatttttcaacagtgctctctaaatcttctaaaatatatgaagaatctttttgaatatcatccattgtttcaagttctgattttaattgatttaaacgaggtgataaaacttctgaaatttcagttaaatatgacgatatttttatttcatattcatcaatttccttcaatgtttcttgatgtgatttctctaatttgggtaattgtgtatgtatctctcttaaaagtttttcatcatctggtgatatcgtagtttgtgaaaatgatgaattaagttcatcttgataattttcaattttgttatcaattaattcaattgaattattaattgaatctatctttgaatcaatatttgttaaatcattattatacttagatatttgattatcaaatttagatattttaacaataatttcatttttatcatttaataagccatttaattcatttttcaatttttgactattttggaaatttgtattaatattaaaatcctttaaattaatttcatttttaatttcatttaattcctcttttaatttataaatttcacttttaacatttcttaaatttttcagataatcaatcttactaattttattatctctaaaaccacctgttaaaacaccattattatcacatctatcaccatctaaagtaactgaattaacatggaatttatttgctaattcataacctttttcaatattaacacaaacaacagttctaccaaaaatttgtttaactgcaggttctaaaaaattatcgaatgcaatttttttaattaatggaactgattcattattttgaggaaattggaaatcttcattcttcaatctattcagtggtataaaagttgttctacaatatttaacttttttcaattcttcaattaaaatacttgcagtttgatcattattaacaacaatatgaaataatgaattaccaccaattacatcagctgcaattttatatttttcagaaacatcaattaattcacctaaataaccataaataccattttcaatatttggacctaaattatgggcaatatctttaacaatatccaatgcatttaatgaaacattaccattatcaatattatttttaaatggttgttcaattgatgataaactttcttcctttgatgttataatactattaagtttactttcttgtctccataaaacactacgatcatcaactaaagttcttgcctctgattttaaaatggaaatttgatcattcaattgatttattctattatctaattcattattattatttaatgatgatttttcaatatttaaagattcaagatttttctgaattttacttttttcaatttcacattccttcaatgtattatttttcttatttttagaatcgtttagtaaattgatctcatttttaatatgtttatctctttcagattttgaagaatatttagatttttgattttgtcttgcaattatagaagtttgcttttgacgataatctgaaattttaattttaatttcattttcatttaatttaatttttttcaaattttcctttaaactaataatttgatttttcttttcttgaatttcttcattaattttctttattttataattataagattcaattgaatgagatgattcaacattaattttagcttcctttatttgaacatttaaatttgaaatttgttgtaaaatttctctattttctttattattaattgataaatcaattttaattaatttttcctttgaatttaaatcatttaaaatattttcacaatttgaaatttccgattctctattttctaattgattaattaatgattcagtctcatttgtggtattattatacttatcttcaattaaatcaatttgatcacttaaagcttttaattctctatcataaatattaaattctaaaattttctttttactatttaatttttcaaaagattttaaatcttccttttcaatatttaattcatctaatcttttctcaatatctaaaagcatatccttaatttgtaattgcttttgagatgtgattgacatttcctttaaagaatcttttaatttattttcgaaaactcttgcacctgcaatatcttttaataattctaatctttcactatcttttgcattagttagagcagtaactttaccttgaggtacgatataataaggatttgattttgagaaacctgaagcttctaataaattcataatttcagatttagttgtacttttataatctaatgaatagtcatcctttttcataccaattgtacgtctaattgaaatttcatccttagcaattggaattctacgatctttattatcgaaaataatttcaacaaatgctgacattatatttacagaactttcatgaataagtgattgacgttcctcacgtgtcatattattataagcatcactaagtacaaatctaattgctgcaaagaaatttgatttacctgaaccatttctaccaactacaatattattatgaggtgataaatcttctattatagtttcatttttgtaagttttaaaacctcttataataacacgtttaatatacattattgagggtatttatggagtgttaaaaagtgtttaatgtgtgaataagaacagatttaaaagaagaatgatgttgtgaaaagagctgagcattttacagagatggcaaattgtaaataaaaatgaaaattatgaaattttcaattacgcgtatctattttcatttgtttcgtgttagtttagtataggagtagaattacatgacatacacatttttgttaataaattcattcacctttataataagaaggttgatagaatggcatttttgcaacttgtgcatctcttaatttacctctaatttcaactttaacctttgtaccaattttattaaaaggtttattaaggaaaacttgagcaacattaccgccacaacttggagaaggtgaacctgaacaaacaataccaatttcctttgatggatcatcaaatgcaaaaattttattactatgtcttggggaaggaccttttgatacaataccaactcttttaaatttaactgatttattatcattaatttgatttaaaattttggatgaaccattaaaatttgcaaattcaccatctcttcttgattttgatactaaccaattaagtgaagcttcaattggagttatatcttcatttaattcatgaccatataaacacatacctgcctctaatctaagagaatctcttgcagctaaaccaattggtttaacaatttgatcatattctaataaagcattgaaaaaatctctaccaatttgatcatttggaattgaaatttcaaaaccatcttcaccagtataaccacctcttgagatatgaaatttatcagatgatgatgagaaaccttttaaatcaataaatcttgaattaccaaaatataaatcatttaaatttgaatttgtaaattttgataaaatttcttgagattttggaccttgaattgctaataaagtaccttcaaaattttcatgaattattttatcattatttgggaaatttttcaattcatctttaataaatttaatatctttttctctacaaccagcatttgtaacaatataataagaatcatcattatgttttgttataattgtatcatcaattataccaccattattatttaaaagtacagataaatgattttggaaaggttttaaagaatttaaatcagttggtacaattttttgtaagaaattagttgtatttggacccgatattttatgttgtaacatatgagaaacatcgaaaataccacaatttgatctagtccaattatgagattgaatatgagattgatctttataaagaacaggcattgaataaccagcaaatggaaccattgttgcacctaatttaacatgaatatcatataaaggagttttcaaaagattttcattattatcattagttgaataagaagatttctttgatactatattaattgaatttttgaataattgagagttattactgatagtattagaggataatttagaagataattttaacattgtatgatgagataagattagataagataagatcttagaaaagaagtattataataaatttgaaaaaggatagttataaggatatcaactcttacttatagtaatataccaattgaataccaatatcataaacctttcttttattctattgaaatagattgtagataataccttgtttaaataccttaaggccactgctttttatcttatagaggagttatttgacttctatgttctgtgacttcttttcttgacttctaaacaagaaaatttgacttctcaaatttaataaaatgattacataattaataaaatgattacatcatcaacacaacaataaaaactgtcataaaaggaaataaagggaaaatgaaaataagtgaaaatggaaataataaaataatatttaaaatactatggacataatacccccttttcatcaatcaaggaaaagtaagttagtcaattaatatagtatatcattatcaaatgtctcaatcaactaaaattgggaaacctaattcatctactgtacccagtaaaagagagagatcaagtaaagcctgtatctcttgtcataataaaaaaattaaatgtaatttagataaagtaccttcaaatacaaaatgtcaaaattgtcaatcttcaaatttagaatgtcgtctctatgttagaaaaaagagggcaagttccaaaaatgcaaattcaattgttgataataaaaattttaattccttcccaaataataagaaaagacatttatctgataataataatagagataataataataatactgctactgacactgctactcataaaatcaataatacatcaaataatacatcaaataatacatcaaataatacatcaaataatacatcaaatagtttaccttcttcaaattctaatcatataccgaatcggaaacatagtatacttaattcaaattttagttctttagattctcatactgatgttaaatcaacttcttcaataccaaaattcccaacttctttcctaaactcttcaaaacataataaatatcctcatttaagtgcaatttcattagatccaaatttaattttgaaggaaaatttacgtgatttaatgataacagaatttggtattagtggtgaatcaaataatttaatgaaaaaaatcttcaataaagctttaaataaaataactgaagatcataaacgttcttattcattagattctcttgatttagaagttttacaatcttttggttgcttctcaattcctgatgaatcaacttgttggaaatatattgataatttctttgaatttattaatcctcaattaccaattattgataaaactaatttttatcaaaattatacaaatttacaaaatcctccatctcttttattattattctcaatcttatatgttggttcttggcatgaatcaaatgatccaacaaagcaacttgaaaatgtagaaatttctcaaattttatttaaacgtgcaactttaatttatcaatattcaattgaaactgaaccaattgctttaatccaatcattactttgtttctcatttaataatggtaatatgtcaaatattgctaaaaatagttattattggtgtcatgcagcaattaatgtttgttatcaatatggtattcatttaaaaccttcatctgatttaaatcaatatgaaaaaaaaattaggaaaagattatggtggattttatattttaaagatagattaacttgttttggttattcaagaccttcaattataaatttaaatcaatctgatcattcaatgattaatttatctgatttatcagatactggtatgactccattagaatctctttatttaattaatttagttaaatttggtaaattaattgataaaattggttcaattcaacaagaaatcactaaattatatttagatggtaaaccaactcttaatttaattaaaaaatgtgatttaattatgattaaatatttaaataatataccaaaagaattaaaatttaaatttaatgataaatcaactcattcattcctttcattaatgattttatctcaatattatactttattaattgttattcataaggcaaatattttaagacatgcaacggatatttatccatcttgggcaatctcatttcaagctgtacaaataattaaaatgatgagtgattgtttagttgctaaaaatttaataagtaaagttgcatttgtctctcataatagtttaacaacttctgctttaattatgagttatcatttaattaatgaagatcctaaaatttctaaaattgcaaaagattcatttttaagaattatgggtatttggagacaatcttatacaaaatttccaaattgttatccaatgttatgtatatttgcaacaatttatgattcagaagattatttaaaacaaattgttaaatctgttgtacctaatgaaaataaatctttaattcatccaaaaggaaagaataaaagtaaatcaaaacaccataaaataaagattgaaaatgagaatggagttgaaattaagaatgaaaataatatcaaaaccgaaaatgaaaatgaaaacgacaatgtaaatgacaatgataatacccttgataataaagatgaacttaatactagaaataatactaataattattcaggagaatctgaaaattcaacaaatgaagacaaattagaagaaaagaaaaaaattaatttacccgatttatcattattagcaacaggtgaattagaaataaaaaatttaaaatttaatacaaattttacaaattttgaacatttaggtgttgattttgataaattatttactgaaagtgttttcactaatggtgataacttattaccaaaattagatttggaatcaattggtaatccaaaacctataagtttagaaaataattcattaaataatataaataataaaaaggaaaataatgatggtagttttcttaaacctccaatttcatcagatgataagaatatttcaaataattatcaatcaattgaaatgaatcaaaataataatatttcaatttcttcatcacatgataatagtaacattaatgaatcattcttagaattcaaaaatttaaatttttcaaatacaccagatattaatttagatagtaataatccagttgtacctgatgctaatataccaataagtttatggatgatgaaaactaattggcaaccaaaatttaatcttgaacaatcagattcatcatttgataatacaacaccaagtgaaaatatgttcaatcatgaacacattaatatgagtacaaatactaatcctaacattccaaataatcacaatactcatccaattagtacaaattcaccatattttagtaataataatgatgagaatgttaattatcgatttaaaaaaattaatgaaaatgatacaagggctgaaaatattttttatgcaaatagttatcaaataatgggtggtaaaccaaaaaatgattataatacttcaaataattttaatgatcaagaatttgataataatgattataatgctaatattgataattatccacatgtttatgcatataatgattcatggcatcataaacagcttaaaaatcaaccaataattaattctaattccaattctaactcaaattctaattcatctaatattaaacaaaattctttatcaccatattataataatgaaacaagtgttaaatgtagtttattagaggataaaaataattttgaaacgaaaaaatttaatagttattataatcaaactcaaaatttacatcatttagttcataccaattatgctatacatggaattactcaaaataatgtaaataatataccaccacaggctactcaacaatggataccttcaagaaatgaaccttactataatcctaataccaattataatgatacttttactaatactaataacactactatgatcactaataatcctaacaataatcagatcatgtacaataacactccatcatatgaacctaatcctaacacagaaaataggcataatggggatcccacaatgtataattacggaaactgaccaacaaattttgtaacactaaaaaacacttctataataatgaactaatttataaaaaaaaaacaataaaaatactaacttggagggaattaaacaagattaaaacttattttaatctaatctttgaatcaaatgtatgtttatttaataaataaaatcctagccataaaaatgcagctactgtgaatgatatgaaaacaacatcagggaaatatatcaatcctgcaccatcagaagtaccatcattattttgactaccaaaattttctgaaacataacccataattgatggtatgattgctgcacctgtacctccaaaacctgcaattaatgaaataccatttaatgaaaatcttttaggtaatgtttttaaagcaattataattgttgtaccaaataatggaccaacaaaccaaccggcaatacaaatacaaataacttgtaatctaactgatgattcaaatatccaaaatcctaaacatcccaaagaaacaaagaaacaataagctacctgtgcatgaatttctttatctttataataacgacctgtgaaaaatcccataaagaatctacctaatgtcatgaataaccaataagatgaagtaatatatgaagcattttgttctgaaacattttgaactctaaataaataattatttaaccaaactccaacacttaattcactaccgacatatgtaaataatgcaattgaataaaagaaaacatatttattacaaatagtttccatcataacaggttctaaactttcatttgaatcaaaatcatcattatcattattattatcatctgagttaagattggaatgtgatgatgatgctaaatatctatattttgcagcagtttcattaccaaaaaatgcatatgccataattaaattaacaaaagctgtgcctaataataataaataatattgattccaaaacatacccctttgaattaatgaaattgataaaactggtgtaactaaacatccaaaaccatacattgaatgcattatacctaataattcatttgaataatctaatgaaccaacaaatgaatttaaaacacaatcaattgtaccaaatgaccaaccaatacaaattgaacaaattggaagtaaaaaatatggtgctttgatgaaaaacaggaatgatggaattaaaacaaaaaaacatgatgatgaatacattatatgtaaaccaaatttacccataaagtaattattaaacatacttgcaggtatataaccacaaaattgtgcaacaaataaataagaaatttgaactctatcaatattatattcattcaagatatattccattaatgaaccaatgacttgatcagttaatccaattaggaataatgatatcattgcagctaccatttgtaattttattttattattttggaaaatatttctattctctaacatgataatttcaccttcaaattctactctttgtacagatgataatgatgctacatctatatcagtctcaattgtaaattcatcaagtgatacagttctttttggtgaatcaggcaaataagtaccattatttgaattatttccactccctgaaaattttgaatcattatctaatttatcattatcatcattatcattattattattattattatcattataatgatctatatgatgcatattatcaacatcataaacttctctgtatgtatccatcaccacttgcgattcactgtctcctgaatatcccatcttagacactttattccagaaggctcaaaagaaaagtttttctaataatataataattaataaaaatgaaaaaaaaaaaaatttcacggagcggttgcacaaaaaagaatagatccacagtcttatcgtatctttaatcttatatcggttgcttttattatttcatcgatgtgactcatttatatctattattatgtcttatactgatctataaggtgtgattatatcatacaaatatcaaaatgcataaaatatggcagtgaatcaagtactgattttgatataatactactcgatgaaaactccgagaacatccgagatggcctatatctgaatagttaccaaatacggatcccatgactcacacactttccattgctgattgaacacttcttattgaaccaactaagaaatcaaatataccagcatatgattgttcctttaacttccttaaaacgtataatttcctttgttcaatttccaattctgacggaggtggggtttcccttgtgtaactgttgtttaaaatattgaatttttcatcttcttttaaatttgaccaaaattcaaatggtaatagaaattgtgacgtctctggtaatgaatctttccagaataaattacagagatcaataatgtatgagttatgcatttttttaaaaattttcattctaggatcttctagatgttggttaccgtattttgtataataacttttgcaatatacaatatgtttcattaatttgtctaatttattcaaacttttggtggaatatgtgtacaatacaaaatcaggttttggtataagtgtctctatttcaattgattcacatgaaatatctttcatcgttgaatatattttcattagttcgttcaaaattttacaattttctgatttaaagaatttgaatataagttgaactaatttgttaaaatcataataactatttttccacttatttacaagataaaccaacccattaatcatagctttattgttattttccatggtatgtttcacaattgatgtcaaaaattgttcatatttatcatattgaggtttcataaactgtattaaatatgggatatttaaaatattatatttcataacatcggatcctgcaaattccaccattatcttagattcaaaaatatcttctataatatcccaagattgtgattcttctgcattgaatgtttgaaatacccctattcctttgaatatccatgcaatatcattagtaaccgacaatagcttactatcttcggataatttcagtatatgctttaaattataaaccaatgactctatatttcgttgaattattaaaatatgtaaaagagtgaaataatacaatgatatattagaatacttaacatcaattgggaattcttctataacatcaatatcattaatattatcaatatttaaattactcaaaattaataaagatttgaaagcatcattaggtcttttcattgataaataaagttcattctgaaagcattcctctgaatatatttgaggtatttggaaatctccaattatatcatcatcctctataaattttctctttctaccagatttattattaattttcagtgacattccatttaaattattaacaactgatatataaatctgtatatttttcaaaaattctaattctattctaccttctctcatagttgtcaaaatataaacatgttttgattgtaatttgccaaacgtattattaggtattttaacattttctaaaatcattgtatattttaaatataacatatggaaaagatctgttttggggacatttttaagatgatctgcaaaatataataataaatgtaatgaagttttaggattaaattcataaaattctaaaaccatattgagtttcttataattgaagaaataatttttattataataagaatccatttcaaatgttaaattaagaaggtatattagaaacaaacccatattatatcgtagataaccaatatgcaaagtatcaaatataaaacttagtatttgtaaatactttttatctaacttaatatttgcaaaattaattactaaaaaatttgataatttaatttgtaaattttgatgtaaatattttatctttaattttttattataataagttggaactttaaagcaacatataattttcaaaattgtatcaaaatcaattaattcattacaatataagattgagataagttttgatttatgattgattttaagtattgaatttgtattaactatttcatttataattttttgtaattgtgataatgtaagtccatattctatagccaatccctccaattcttcaaaaaaatcattaaaagagtccaaatcatcgaaaatacgttctaatatggtatccactcgttggatatcgtaatctttgtacatacagacggtgattgttgatgaatatagtgttgttgatgttgatgttgatatatttttaccattttgtgaaaatttacatgttgacgcgtatgaaggatctgatctttatgataaggtggttaagtagagaagatatctttgattgtagtgtatagattaatgtatttcattagatactattgttatatacaggatatttaatttataaatggtatttctttatatatatgtaatttattattaatgtgataatgatttagaatatctaataaattgtgatttaatatcatttgcattgattttgcataaatcattcattaaatcacttgatctattagttataatattttcaattgtttcctcatttgaataaagtttctttaactcaattatttcgttatttgcattattataacgttgttcaatatttttataagcataaggatcaactcttaaaatattatttttttcctctattgacagattagtaaattcaatataatctttttcaacagttggatcaattgaaattgaatcaacttgatttttacaatattgtattatatgatttctcttttcccattctggataaactaatttttctaaaagtgaattacaagctgattttgatgaactattaatatcagtattgattaattttaatattgattcatgattttgttcattatgattaagcatactataaatagttgatcttaaattatcatctaatgaatttcttgaaatttttagaaaagtttgtaaacttttcgaatctttaatacatattgttttggataattgaggaataggttgtaaattatccaatatattaatatccaggggatcattgcccctattagaagcgtacatggtgggtataagaaagaaagtattactagtcattaataagtaaaattcatgttaatataaaattttagaaatcgaggtatttcttcactatgggaaaattacatgttctttttaatgagagagttatagtgtctttcttttattatatttgtaggaacaactacacagatatgagtaatcaagataagacaacggaggagttacgtaaattaggtaatgaaaagtttagaaatcaaaattatggaggtgcattaatgtgttatacacaagctattgataaagaaccaaataattttgcattatattataatagatcaattacattagttaaaatgaatgcaatggatgaagcaaaggaagatttattaattagtactaaattaaatgatgaatatattccaagtttatgtcaattagcatttatttatctatatgaaggtgatacaccaaattctttagagacatatgttaaaattattaaaattaatgaaaaattaccaaatcaattaaatagatttaaagcacaattaaaggaatcaattagattatgtgaagaaagatgtaaacaacaagaatattctgaaaattttattaattcaataattacaccaaatattagagaaattattaattcatatccaaatttaccaactcatatgattgaatcaggtataccaccaatttcatttggtaatgtatcaatttctcaaatgggtaattcattaagtccttcaccagcagttttagcaggttcaattagagttggtagaactaatgccaatgctaatactaataataatggtactaataacaatggtaatattaatataagtgcgccaaatgcagctgtagatattggtaatgcaatcagtcaagcattaaatgcatcaggatttgcaaatttatccaatattccaacaattattaataatactagaaatgcagatgcaaattcaaacaatacagatacaaatactactgcaaatacaaatacaaatgctaatactactgcaaatattgcagatattcaccgtaatgctcataatgaagcaattgcaactgcacttcgtagaagtgaagaattgagaaatgaaaggaataataacaatgtacctgtatcagtgcctacacaaacaactgaatcaacaaatacaccaacaccagcttctacagctgcagtatttacaacagatacacgtaatgctaatgatttttcaaatcaattagccaatactataacatcacaattaagtaatgttattaataatcaatttggtacaaatttaaatcctagtacaattgaagcaatttcatcaaatctgagtaatggagttggtaatcttgcgagagaggttataaatggttttagtggtaatgttagtaatagtgctgatagtaatagtaccaattctaccagtgctacaactaccagtggtagtgtcagtaccaatgataatgataatcataatgataatacaccacttgatgaaaacttagatctggacattgattagagaaggaagaaaattaaaaataaaatttcaacggctcagcgatttttataacagttttgtgtagatcactttatcttctccttttgtaaataatggaggaatatctgtattgtggtatatgttataagaatatacgggacactacattatatttaacatcatgtgcacatgtaatttgtgaggaacatgttgaaagagattattgtaataaatgtaaaaataggggagttagtataattaagattgagaaagatttaaatttaatagaggataatataagggatataattgaaccaagttatgagaaattaagtaatttacaattaggaaataaatttcaatttgaacaaatgaagggattaattgattattataagaataatgttaaaaatttaagggaaaagaataatagactgaaggaattattacgtaaaagtcgaaatgaattagataaatgtagtggatatcaaaaagagattgaagaattaaagaaagagattaaggatagggatattaaggagagaagtttaagtaatggaaaaggaattgaatttgttaataaattaaagaaatttagtatgaaaagtagggaaaatagtgttacaagagatgatcaaaggaataatgataataatcatataaggaataacgataataataatcatataaggaatatgagtatacaagctgagagtacaaatattaatacaagtagtcttattaggagtaatttaagtagtagtaaaattggaaatggaaatggaggtggaaatagaggtggaaatagaggtagaattatgagtagtatgggtaatattagtagtagtttgaatagtagtagtagtagtagtaggatgggtattaaaagtagtagtagtagtagtagtagtagtagtagtatcaatggtagtaataatatgaatatgaataataaacgaataaagagtcgacaaatgatgtttaaacctccaatcagtagaaatttgaataattataataaaagatgatggaatgataatatgatgatatgatgaattgaataattgctaataattttgataaaatttatttattagaattgtaaaattttataaaagtaaataatataatataatagatagaagaatgaataaatgattaaattaataatttgttaatgactaaaattaaagtaaaccagctctcttttgttgaacaaaaactgcaaagaatgggatacctgcaccaacaacccaaaagataatatgaggaattgcataaggaactcttctattcttaactttaaaaggtaagttattataagcaccttcagggaaatgagaagataaattctttgaagatgaagtgaaagttcttgcagatgatttagttgcaggtctaatagatcttgataattgagcaaacattgtgtgaataatgaattgtagatagatatactaagtctaagtctttactatagtatactatactaatactaatactaagtcgcaccatacatagtaaagaaaaagagagagagatggaaaagaaagattttcattggatgaagagaaaagataattggtgtacggttagttattttatttaagttttactattactattactattactatggtgcgatttactatttgtatgattatgattatgattatgatttagtattacattcattttagtttatatacaaagacaaacaaacttatatcaattatggctattgctcctattgctggtactatgaagagaaagattattatcgacatcaccgtcggttttgcaattggtggtgttatgggtgttgcttggtggtctcaacataagaaaattattgcaactagagaaaattattatgcttctcttgctgaaaagaagaaaattgaagattctgcttaattcttagtcttattataactactttacactactattcatttctatctctatttatatttattccaatatattaatattatctaaatctattactattactattactattactattactataacgcttaagtgaatgaaagattttttttctcttttgtattacgtaaggctgtgattatgtaatacttcactagccacatttccataatttttttcatttcacttgcggctggtgtgggtacatgaatatttcaatatcttaatcttatatatacagcaaataacattttaataacaacttccttatctaatggacgatttactctcaatattcgactctttaccaccttctatactggtattagataaatctctttctcatattttaaaccatttaactaaaaattctttctctactttcataaattctgctaaaatcaaaaaaactagttggttaccagattcattaaataattcatcatcatcatcattaactactcctcctctaactaataccccagatactcccattgtatttctaataaacttattatcaaatgaaaatttatcaaaattactactattatctaatttaattcataattggaaattatcaacattacctcatttaatagtttatcatcctttattagatatatcattacactcatatatttcaaatattggtttagaatctcaattagcttcatttaatatatggtcaactcaattaccttcaatttcttattcaatttcaaataatttatcaattcattcacttgatttatcatttgcttttaaagatttatatttaaataattctccaatacctttacaattattagcaaattatttacttaatttaaatatagaaaataattataatttaagaattacaaatactttccttaaaggccctctttcaaatcaattttattcaatttattcaagattattaaattctcatattctttcattacctgattctaaaagaaaaattattgatgatattgatgatactatctttgcagatacaaattctttttataataattcagttcatttaatatcaattgatagatcaaatgatttattaccttgtgttttagctcaactatcttatactggtataatatccgaatttttcaatttatcatccccaattgaaccatttaatctcccaacagaatcagaatcaatttcaaatcaacaaaaaacaacttcaatttcatcattattttcaaatgaaaatcaaatttcaaatataattggtgatttaaattttagtcatgttggtccaatcttaaataaaaatgcaaaacttctacaatctcaattaaataaaaaggataatttaaataatatagatgaaattaaattattcgttaatgatttatctaatcttaattcaactaaatccctcatttcaactcatacttcaatagctgatttaattttatcatcattaaataaatccccattacaatatcaaaaacctcttaatatacctttattagaagatatccccctttcaactcattcagatgttctaacatcatattattctagattaatggatttacaacattccattctaaataatgaattaaattcaatttcaatccttaaagatttatcattaattataagttcatataatgatgatgttcaattatacgatattttcaaaattttaatattattatcaattgttaaaaatggtattaatgcaaatgatttcgcaaattacttatacaatgatatgattttcaaatttaattcaacaaaagttctaccaattcttttaaatttacaaaaaataaatataatagttttcaataattcatcaaatataaatttaccttcatttttatcattatcaaaaaataatcaacaatctcacattcctctgtcacaatcaacaaactcaactttaatatcttcacaatcaataacagacttcaatacattatcatcaactcttaaccttctaccaatccatgaagaatcttcttctccctctatgattaacaacataactgattatgatgacgcagattttacatatacaggttacgtaccaattttaacaagacttatacaatcaatttatacaagatcatttatttcaagtccagatactgatcgtgcaattgtttatggatggaataatttagatttatcatcattatcaacatcaacaactcaatcatttttagttccacaatctaaaaagcaattatttaattcaattataccacctaaaatttcagaactttcaaaaatttcgaaaagtacaataattataatggcaattggtggtataacttggtcagaaatttcatcaattaaatatattttagcaaaaaatcctttaactaaatttaaaaagattattattttaacaacgggtataattaacagcaatcaattcatttcatccttatcaaatccttcataattgtataaatctttctatctatactttggataatacccactacgtactttatcctcataatctaataataaagcaactaatcttacaatacatttccttaatgcatcactaacactctcctttttacattttctaaacatcatttcccttggtaaattcataccaatcccaataccttcctcttgtacaagagtattatctgcaagtataacagtaacaacactcttaacttctaatttttcttcattataattaattattctactactctcaactttactcatccaattatcaattccataactttcattaactatattaactaatttagataacccaattttaatattactaccacctctccaattattcttactatctaatctctgatattctcgaaatagtatattggttttattaactgaccatttacttgctaatttacccctagtttcattatctggatcaattattgaatttatatctggcatccattgtaaataaatctcattctctttatctttgtttattgatggtttagtatttgattgatattcatctaataatgtaggttcgttacacgttgttggggttattctatggtatattggcattaatgttttataaaaatgataaagctttgtgctatcaattaacgtgttagcacatgtgtggactcgcttagtattattttattttatttcattgtaattataaaatgtgatctatttttattttttgtatttacaaagtatgtttatttaaaaatttaatatagaaatcagttttcaacaactgcattaaagatatcatcatataatggtttaataccacaaaatttttcaaattgtgcaataccttgattaactaacatttcacgacctggaataactttccaattatatttttcttcagctaatttcataattggtgtaattagtggtttatatgcagcttctaacaaataaccaccattattattatcaattttagataatgacttttcaataatttctgcaaatgatccagttaattcaatatcagctggaattgtggaaacaattaattgaatttcacctttaatatcttcaattttattaacaactgtaatattatattcaactgggaatgatgctgcaatttcttcaactttagaaacagttctgtttaacatataaatattcttacatcccattgaatgtaatgcataaactgctgctcttgaagttccaccaccaccaataattaaaccattttcacctgaaacaacaccatttttattaaatgattcagtaatcccaatccaatcagtattatcaccatttaatccaccgttgttatttggatataatgtattaatagcaccaataacttttgctgattcacttaattcagttgcatatttcatcatttcaatctttaatggaattgtaattgcacatccaccaaatttatcttgttcaacaattttttcattaacttcttctgcattatcagtttcatatttatcaaatttataaggtaatccaaattcttcataacctttattatgtaaaactggtgatcttgaatggccaattggtttaccaacaacataaaaattctttggttctaattcaccaatcattgctaatgattcattaatttgtttaattgataattgaccaggtgcagcagaatttggtaacaatggatgagtgactggtgttaataatggattaacaattcttgataattgacctaatctagtcatattaattgcaattaatggtttattcttatgtgaatttctgaaattttctaacatataattatcattaaaatctgttgcagtaccaacaaatttaataatatcaacatttgaattatttgcaaattgatatttgttttcccattcagaattatcccatttaaagttacctgaaaaatcatgatgtgatccaataattttggtgaatctcttctttgataataaagttgcaaataaaccttctggtaatgataattccatatcaacatatgaaatacccatcttgaatgctaacatagttaatgcttcaattgattcataatcatcatcattgaatgcaccaccttgtgatttagttctaattgtgaaaattattggtaaatcacaatgagttcttaataatccaacttgttcagcaacaaaatcaatatcataagattctaataaatcaacccttagttcaactgcattacaacctgcggtaatctttcttaaattctttaatgattctgcattatttacatttttgtaagttaaacagacaaaatatgatcttgattttggaatttcaattggattaccaataatttcttcaacaaatgatcccattgtcttttttaaacttgataattgagcatcagttccacaatgtggtaagtagaaataataattagaacatttttcatataatgtctttcttctgttccaaacacttaaaatttcttctgcatatgcaggtctttcagtatccttttcatttaaaaatttgattgtttcattaatatctctatgtaaatgcagaacaataccattttgcttttcataatattcaactaataattctctcgcttgaggaatttcaacaataccaccaccagtggaaataacataaccttcactaaacttacttaagacttctttaaatgtttccaattcttgttttctaaattcttcccatgaattttcttcaacaaattttttaatagttttaccaattttttgttcataataatgatcaacatctaaaattttgaatttattatgagatgaaataatttttgacattgaacttttacctgcagctctcataccaatcaaaataatacttttgttaccatttttctttgcagttaccttactagattcagcaaatgatgatggttcataaccatctaattgagcacctaattcagtatgtaaaacatcccaccatcctggccatgttttagaagtacaatatctttcttgaacaataactgattcatttgattgaaccatacctgctaataatgaaaaactcatagcaacacgatgatcatcatatgaataaataccaggttcatttggaacttttaaattcttataatcaataccatgaatgacaataccatcatctaattcagttgcaataacaccaaatttagctaattgaactctcattgcttcaattctattacactctttaactctttgattagcaatacctgtaatagttgttggattttcaggatcattagcaattgctgcaacaacagttgcagttaagaatgcatcagtcattggttccatatcaacatgtttcaaaggttttaaagtaccaacaggtggaccttcaacagttgtactggttgcagtttgttcaactttacaacccattggttttaaaacatcaactgcaaatctagcatcaccttgtaatgaacttgaaccaatatttggaattgtacatttgctacctgtcattgcagcaaatgctaatggataagttgcacttgaagcatctgattcaataacatattcacttggattaacataatgacctaacggaatatggtaagtatactcttcatcctttgatttaacaacttcaataccaaatgatgacatcattctaattgtcatatcaatatataattgagaaattggtttaccaccaactaatgataaagtaacaggagtttgagcataaggtgcagctaataaaatagatgaaacatattgggatgaaacagttgcaccaagttcaattctaccacctttcaaacctttaccacaattaactttaattggtaatgaaccttccctattaagacattcaatttcacaaccattctttcttaatgcatcaattaatggaccattaggtctttcttgcattcttttattaccagttaattgaatagtatcaattgatccatttttattaactaaacatgcaatagtggttaaaaatcttgaagcagtacctgcattacctaaatagatttcttcatcagttgtaattaatttaccaccgttaccatttaaaacaacagtttcaccattatcttcccaagtaatttcagcaccctttaaggctgaaactgcagtaagcatgtgatgagtatcatcagaatgaagtaaattttttaatttacattgacctttaccaagagcagctaaaattaaagctctattggagatagattttgaacctggtggagtaacaacaacatcttttttattttgaaggtcaaatggtttaactctaacatcttcagttaaaataactcttaaatcagaatcattaacataagatgctgaaggttcataacattcaccaatttttttcaataaaacaacttttttctttgaaccatcattttttttatcaatcgccatctttttcaataagatatcaacaggacaaactttaccattagctctactttgaacgattttatcatgaattgagactggtaaaccataaccttcgaaaacttttcttaatcttgaaactgcaacaggtggtaaaatacctaaatatctacttaattctgcttccttaatagaaccaattgcaacacattcaccatgtaagatttgaggagttaaaatagcttcgtaagcatgaccaattgaatgaccaaaatttaaaagatttcttaaaccaccttctctttcatctaatgaaacaacttcagctttaactttaattgattcaagaactaatttatagatatgatcaagaattggagttaaatcaacatcaccctttgatctatcattaataacatttaagaaaatttcagtatgagcttctaatctatcaaattcatcttcattccaaattgcagcagttttaataacttctgccataccattaataaattctctaacaggtaaagtttcaaggaatgagatatcaactaaaacatattgtggttgccaaaatgcaccaacaaaatttttacctaatggagtatcgattgcagttttaccaccaattgatgaatcaaccattgctaataaagtagttggaatttgaacaactttaacacctctcatgaaagtagctgcaacataaccaatcatatcaccaataataccaccacccatagcaataatgattgtatctcttgtacaaccttcagataaaagataatcttcaactgctgccttggtaattctatttttatttgcttcaccaggtgagataacataagttaaaagtctagcttctggtcttaatctagcaatagtttctaaaaatgcagtcttatatctatctaaatgacctgctttaactaaatttgtatctgtaacaataacataagttgatgattttaatgtactaacaatttcatcacaaatatgattttgaatcttgtaaccaacatgaatggtatctttaccaagaatggtgactttttctacttgtccctcttgtaccattattaagcaataactaggggagttgtttaataaatattctacaaataaattaaaaaacttaaataagtatcagataaagttccctttctaaataatttgaccctactgatcaaatttcaaagagtaaaatgtcatgtcaatgctgaaaaatcgcgccgaagaaaagagaaaaagaaaacagcggaaccggagattgttgagtcatagaaaaaattttaatttatttatttattacgtaagtatttacatcaaattattacgtaagtatcttatatcttacagttgcatcttttgacgaatgagtccctccatcttcccagctatcagatcattaagattatcaaagtatttttcaagatcttctagattagattggtagtctaatttatattgttcaacattttcaattttatctaatttggcaaattcatatgcttccttaaatatgataaagttagaattaatatatgcttgaattgaattatgtgaatcaaaactaatatcatcactaactgattcaatctcaacacttgctaaatataatgctggagcaatggtgaattgataaatatcattaacccttttacttaaaaatctaaatacttcttgtaaatattgattcttagcattagtagtttcaattattgtctgaaatgatttaatagtcttattttcaaatggaataaaagtttttctttcgatatcttcaattaattgcttacttttttccatttcatttatttgttgcaatgttattaactttaaattagcattggataattcacgttcagatttcttatatagacttaacagattgctattttctgaggtgagtgtattgtattcacttttgaagagattcatattttcaaaatattcatccttttgcagttttaaatctttgatatgagtttcttgaagttcaactctttcaatcaaaaatttattttcctcttttaaatcctcaacttcctttaaaagtgcagatttacccaatgaaaacgataatttccgctttaaatcccaaccactacgattaattgattcattattagattttgatgatggccttataatgttttcctcttgaacataatttgtatcaaaatgatgatgaccaactatttcagttgcattatttgtctcagtttcaatttcaatttcttttccattatcattcacatttttcattgaaagttcgggctttcttatttcaattccactatcatttccggaaaatcgaactcgaatacttctatcttcaattgagcttttatcattcatatctccaatcacttcagttattttttgataatgttcattatttgaactagaatctatatcgatatctgtttctgtactatattttgaacttgatgcatcttccataaataaattttcaaattcatcttgttcctccttaggactaatcgcttggtttgtctcaaccttaatttcaacttcttcttgatcaggtttaggtattggttttgccttttgagtaccttgtatatttaaaactttatgaccaattgggatttcaagataactttccttagttgagtttgtgtctacatcataagaatttccaactacaacatttacattttgtccccttttttcttgattactatctgtttcagaatcataacttctactatggagataaaagtctttcaaagttgagtctggatcaactagatccatattactttcttcctttttatcttctttgaaattgttttccttagaaaatatttcttgaattggtaaagaatttttttgatgtgcttccctatttgaatcatcataattattaacactatttacagtttcaccaacagttccgtttatatcatcataaaatctaacactttttttacgaggactaataattttcaaatctgatgttcttaactgatataaatcattagttgtagaatcggataaaatacttgctgatagatcagaataagtattgggaaaataagctgacattttcacgttttattctaatattaaaactctcttatattttttaagcaaattttctagcaaattaaacgtgatctaatagtattctacacgttgtcaatgaaaagaatgagcaaagggtaattaaaaataaatgaaaagggatcaaaaaattaataataatataaggttttaaaaaaattattattatgataacggcgaggaaactccgatctccgtattatgctacttttcagtctctatactggcttataaacaaagttatttaatggatcaaatcttattagagttattcaatgataacattgaaaaaagtttagtattccattcatcatcccaacgtctttgactttctaacaacgcaccgttcttaatattgacatatttatccttttcttccttattaaataacaatcctaaaatatcatcactcatactgatttcgtccttattatcctttaatatgacaccattttcatcatcgttaactaattctttgatgaccggataattcatggaaacaacaggaacaccagaaccaaataaatcaacaattttcattggtagatctaaccctgatgatgatacatgtaatgagatacctaagtctgcaatttttaaaatattcggatattcagatattggtaaccaaacatttttaatgactatatttgtccatttatatgaattaatagaattaaggaaagtttcctgtaatggacctttacctgtgacaatcataattatacgattatttgtacctgataatttttcattcattaatttcaagcatttaactaagattataaaatcttcatcaggtgtgaatgatgttgaagttattaatattctatcgtttaattgattataattaacatctttactaaataatgattcattatttgttaagattttctttaattcattttgtgatgataatggttggaaaatatgacttggacgatcatatacagtcataattttatctgaatttaaaccaaattcctctattaaataatttttcaatgcttttgtaacggttatattgaaatcagcaaattttaaactacaatatttttcataaaatttcatcaatttaataattggatgattttcattttgatatttcaaatttaaaattgaccaattaagattatgccaatcaataattatttgaacatttggagcccaaatttttttaattaaaccaattattaataaaattggcaatgaaggtggattttgtatcaggacaaatcttgtattatcaccaatgatatttttcaataaatttgttaaataaaaaatttgatttataactttcaaaaatgcaaatattaaatatggtaaatatcttttccttttaataactggtatatcataaatttcaatattatccggatcatataaaaattgaggtaaactactctctagataaccacataaattaacatgataacctaaatctttgaaactttttgcatgatatgacattcttggtgaatgacctaaatcacctaaaacaactataacaacttcattaatatcataagataattcaattcttttcctttttttatagacacgttgaatatatgaataatagctataagttttagctgttaaaggtaatgataaccaaaataggattaacagccaagtttgaattgagaatttaaaatgaccatcagggaatcccacatatttaatgatttcaaccattagattgttattaaatgaagctgtactagtagtgattctgaaatcagtaaacacgtaagcaatttttgttcacagtgttaagtataagattcatgagagcgaacgttaattccacgttcggagttaagtcaataataaaaaaaaatttactatgataactaaaattccctcactaaaataatatggataaactccgaaacacaatcaaagtgaacataagataacattaagaggaatatttaaacagaaaacaacactaaaaaactgatgtcaaactatttgaaaataaaacacctcaaatagaagttgaacagactactagaagcctaaaaatgacactaaatgggagaggagggggcaattatgatgaaaaaggtactaaaatagatgggtgtgtggccgagaggttaaggcgtcaggatcagaacctgattttcttaggatttcctgggttcgatccccagcacactcatcaattaccttattttttgctactagtgaataaataaatgacctagaacctaatttaaatatgataaaaccagtccaaagctactaaaatagtgtcaaatgcattataattaagcagtttggcataatatgcaaagtgatgagccttaaaatgtgtcaaaactgtgctagttgaaaattcgcgaattattcagtatgaaatttacacattgcaaacctcaaatttacccactcccctcaaataatatcattttcgggataactctgctgttgagccccctcttgaatataccgttatatgttaccgtaagctattaatattttatcagcagaaacaccagtcatttcttcaaattgtgtggggtagatgatgttgatgtatacttgtttggtatatttaaataatgatgatttagcccctaaattaataagtaaataatactcgtactaccatttcttcttatttcttatcatatagcaaaaacaaatgcaaagactctctcaaattagtaatcagctatcaccaaatggtgatgctaacaaatcatcttctcaaaatgttcaaaaattacgctctcaaaatgataatgatgtagttatagttgctgcaaatcgtactgctcttacaaaaggttttaaaggttcatttaaagatattaactcagatgaaatcttatataaattattagttgaactttttaaaaataataaatttgatccaagtataattggtgatgtggcagttggtaatgttttaaaccccggtgccggtgttaatgaacatagagctgcagtaattgcagctggtgtaccagtaactgtaccttttattgctttaaatagacaatgctcttcaggtttaatggctattaatgatattgctaataaaattttaactggtcaaattagttgtggtttagcttgtggtgtggaaagtatgtcaaaaaattatggtcctaaagcaattccaaaaatttcaaaatcagttttaaaagcttcaaatgatgctaaaaattgtttattaccaatgggtaatacaagtgaaaatgttaattcaaagttcggtctctcaagaaatgaacaggatgaatttgctgttaattcctataataaagcagaaaaagctgtttcaagtggtttatttaaagatgagatattaccgattaccgttgatattaaagcaaaagatcatgatggcaaagtttcaattaaatctaaaatagtcgaaactgatgaaggtccaagaaaaggtgtcaccgttgaatcactgtctaaacttaaacctgcctttaaaaaagatggttcatcacatgctggtaattcatctcaaatatctgacggtgcagcggctgtcttgttaatgaccagaaaacttgctaaatctcttaacttgaatattctaggaaaatatattgcaactactaatgttggtgtaccacctgatattatgggtattggtcccgctattgcaattcctcatttattagagcaatgtagtgtaccaattgatgatatctctgtatttgaaattaatgaagcatttgcaggtcaagcattgttttcaattaaaaagaataatattgatcttaaaaaagtaaatcctcgtggtggtgcaattgctttaggtcatccgttaggttgtacgggtgcaagacaattatgtactttgttaagagaacttgaaattggtcaattaggtgtggttagtatgtgtataggtggtgggcaaggagctgcaagtttatttattaaggaataaatatcatgatgaagctgtagtagctaagaaaaatttatcttttttttatttttatacataatgtaacaatgatgatttataattaacgacaacaaactctaatgatcttatatcctctataccttattgaaaattaagatattttttcctaatccagaaatatacttgaaaatgcttacgtaatattattaaataaattcatgttaccatagttttttcatcataaataatttaatgaaaactttatattcttcctgatgtcttctggataaaagcttgtataagtatattcacacatcaaataatgtcagaaagtgtggaaacaggttcatcaaacacagctggtaatagcaataataaaaataataaaaacagaaatagaaatagaaacagaaataaaaataaaaataaaatcaataactctaaatctgatcaagaacaaggatcatctaactcaacattaacttcaaacgtcaattcaaatacaaaccaagctaggccatcaaaatctaaatcaaattccaaaaattcaagtaagagtaagtcaaataataacagaaacaataaatcattaaacaaaaaccatgcattattaaaagaatttgaaaaattattaccaataataaatcccatcaccattaatggtatactttccaaatcactttcaactgaaccaataaagtttattgatagcattttatcagatcaatccaataatgatgaaatttttatgacattttttatcaaaccatcagatcctaatttcccatatgatttagaattattatcattaactttatgtatacctcaaacatatcctaataaattaccttcacctacaataatggttttgaatgatgatattccaagaggttttagtgttaatatcgaaataggatttaagaaaattgtagaaactgttttggagaacagaaatgctaggaagggtcaaaatgctataaaagataacaataaaagtgataaaaagaatgataaaaaaacatctgaaaatattgaaggaaatgaagatgacgatgttttgaaaattgaagttgtaggtggaaatgatttagttggtatgattagtacattagatgtttaccttgaaaaattcttatccatggagaagaaagacactattaaacttgtgaaggttatgaacaaaaagaaagaagctgatgaggaaaaaaaattagaagaagagagagttaaaaaggaagaagaagaaaagagaaagaaaaaggaacatgatgaactgataagttcggcattagaccctgaaaaattcaaattaaggacatatgaattggaaaaattcagacaaagattaagaggtaattctattagagtgtttaaggataattctcaaggtatcatctatatattatttttgctattcaaagatgataatcttactcttgagtttgatgattgtgatcaaattgtcattgaaaaactttacattaaattaacagttcctaaagaatacttgaataatcctaaaaaatttataaagttagttgttgatatgtctaattcttacaatattgatttggttagctccatcactgatccaaatgtcagacttatatttggtaaactgataaacaacctttccaaaaactttgacattttttcagcagatgtttcatcaataaattgtgaaaatcctgatgttaattctgatagtttttggacaattatgtcacaacttaacttttttattcataatatacaaaaattcatgaatgaaaaagcagaatttcaaaattggtacaatgcaaacaaagaaatgaataaactcttaatagatgagtctaataatgtttcaagctaatgtttataaacttgtaatttctttactacatcttctactttatagaacttttataaaataaaaacactgtaccttaaattcagatatttcggattttagttcaaacgcgtaacgccgaatcaaaacattgatgaaacatgaatttttcttccaatgttaaatcatcaacaaagtcagaaacgttttctagagaagaaggataacaaaaacgtatcatagcaattgcatttgtgatacattttaaatatagtgtacctctaaaacaattaaatatagatatatgccaaaccgtaaaaaaagttacgtgataaatccccagtttaaggattccaataggaggtctagtctatcatcaactgaatacgaatcattggatccatttaacagtaacgaaaaaacatttgaagataagattattataagtaataaaccatcaaatgggcgaaggactgtttctgagaaatttaacaaaggacttgaaaaattaagaagaaagtcattccatggaatacaacgaatcacctcaagagtgtcatccgtatcaaccacatcaaatggaattgaggatgaaaataatgaaaatgataatactgaagttgatgataccacaaaggagattgagaacagttacattcatacattggattttgataatccttctgatatctctaatgatatcgatgtcaaaagctatacaactttgggattaaaacttgttggaaatggtcttgagtctgacatatccattgatactaataaagatttgatactttgtacaaatgattcgagcaaagataatatttattataactcttccacttcatcaataaatgtgccgactccgaaacaacttgcagaaccaagtttgcctacaccacagtactttataaacaaattattatcaaaagaaatgaaaactaaacattataaattaatggataaaatgataagtggtgtgcttaattcaaacgatttacgtttgtggattgacagtttcttaaactcaaatggatttgtgcttttaaatgaggaactcagtaagatcaactcactatctgtaaagtcaaacactcaattgaagttagaattttatttgctgtcgattgtaaaatcaattatattacaacaaggtgatttgaacattagtaatgaaacattgatggttttaactgaaacaattacatacagtctgatgtctccgaaaatcgaatctatgaacttagcaacgggtgtgctagtattattaattgttaaaaatggattcctgtgttcaaaagtatttttaaaaactttgacaaaaatcacagaattaaattcactatctgtggtaaaagaagagaggggaagtgatttaagttctagtgaaaatgcagtagatccattttctttgtggatcagaaattctattgaactactacatattcatgaatataatttatcttttgatgatgatgagagctcaattgaagaatatatcatgcttacaatttttttgatatgtgaaactgttaatagttttgctaatatacgttcaagagtttcattgagaagtaaactagaagagtcagggttaatacaattgttcaatgatagtaaagtattgagcaataatcccatcaatgatttaatcaaagaatattatcattccaaagaagatgatttattagaaataagctataaaagtttggaccctacaaagtcattatccaccatagaaatttattccaatggtaatgtaaaggagatggtaaagaagctagaaagtttaaaaatcagaaatgctgaaaaccagaagttttacgatgaattggaaaaccttgccacatttttgattgacaataaactaaagaataaagatttgactgactctatatttggagttcttttactcaaatttgagaatgataggaaagctgttagattattgctttctaaatataatcttgaacttatcactaaaactgaatattctgaagaggatggtgagattaaatctaacagtagtgatatcaaagaagaactctacattggtgaacaatttgacccacatgatacttcatttatccaaaatcaaaatattaatctttcacttaaagctccagacgtaacccttgattttattaacaatgccattgatgataccccattaagatacgatatagtctcaagcgctaattctcaaagaacatataaggcatctacaattacagaaacaaacaccaaatggggtatttctggcgataataagttttatggatctggatatggttatattggatcaaatattaacagatcagtaaccgaaaatagtgcagaaactttaaaaaatcattcattttttgaaccctacgatttttatgatatacgtacgtcaaataatacatcaggtaatgaatatattaactacaaccatggttctggcattaatataaatttaaagtcaaattatggtctagatttaggaagtggttatgaaaatggccatggtatgggtgctggaaatggttcaggggtagaaccaggtattggaaatgtaactgaaaatggttcaggtgctgggcgaggtcccagtaatagtgccggtaatggtgccagtaatggtgccggtaatggtgcctctaatggtgctggcaatggtgctggtttaagatacggcaatggactgggttttggcccgagtggccccggtaatggttttggctcaggaattgggttaggtcctggtaatggtcctggtaatggtcctggtaatggtcctggtaatggtcctggtaatggttctggtaatggttctggtaatggtcctggtaatggccctggtaatggccctggtaatggcactggtaatggcactggtaatggttctggtaatggttctggtaatggttctggtaatggtcctggtaatggttctggtaatggttcaggtaagggtccgggtttgggtgctgatttaggacctggtttaggtgaaggtagtggtcctggcttgggtcctggtttaggtgaaggtaatggtattcgtaatggttctgcatcaattttaccaccaccacctcctcctcctcctcctttaccgctcaaattattagcagatggtacatccaatccaaatcccccaacaagagcaaaatctttacctttacttccacctcctccgccacctttaccgccttcgatgaatcttaaagctaaaaatactcttcctcccccacctccgccattacctgtttcaaaaccaaaagttttagaagaaaaatcaagacctgttgttgaactcgtcaaagatccgaatacagagaagttagatcaattaaaacacttgaaaagatcacaaacaaaattgaagcaagttcattgggataaaattgaaaatattagtaatactctttggagtgattcagatgatcaaaacattaacaaaattcttgatgagaggggaattttggctgaaattgaaaattcatttaaggtgaaggaagtaatagtcaagaagaaaaggactgaaactaccaaagaacctcaatcttcaaaattaacatttttacctagagacttgaaacaaacatttgcaatcaatttacatcaatttaatacattatcagcagttgattttgttaagaaagtactgagttgtgatcctgaagtgactaaagcttctcatgttattgaatttttcaataatgaatcagccatggaacttacaccaaatttaatgaaagatttaggaccatattcaaccaattacaaattaggaaaaacagtatcgaagaataatccaaatgaattggaaagatatgatagaatctatgtcgaactctgttataacttgtcgtcttattggaaggctcgttcgcgtgcattgtttgttgcaattacttatgaatcagattataatgatattatttacagattgaatttacttcaaggtggcttggataaattaaaatcatcaaaatcacttgttgagatactggctttaattaaaaatattggaaatttcatgaatgatgattcaaaaatagcactaggtttcaagttgtctactttacaaagattgagatttttaaaagatactacaaataaaatgagtatgatgcaatatgttgagaaaacagtcagaacacatttcccagaatataaagattttgcaaattcactttcagatgtcaataaaattgcaacacttaatattgatgatgttcaaaaaagtgtggaagattttatttcactaattaacagttcatctaggcaaattaaaaatggatctttgagtgataagtctaagttacatcctgatgataagattattgaatattttggtaaaatcatggatcatgcacagaagaaggccttagatttaaaggaaagatttgattatacaatggataatcttgaaactacaatgacatattatgcagaagattttaatgataagaatagtaaaaacacattttttatgaaatttgtttcttttgttgctgaatacaaacaggcgcatatgtacaacattcgaatggaggatgaagagaagaaaagagaaaatagaaaaaaatcatcaatcaaaaattcaaaacataaaaagaaaaaagagatccatgaatcaaaaatggttgaacaaatcatgaagctaagtaaagagaaacataaaaaatcaagtaataataatttgataggggagataactgaagaaaacactgattgtgatgaaacacttattctagacgatgaagaaaagatagaattttcagcttcattaattcagaatgaaaatataaaatctaaagaagaggttgaagataaagttgacaaaaaattggagaaggaaaatgatgtgaaaagtattaaagaagaggtcaaacaagatgttgaaatcactaaaggacttgaggatgatgtatttggaactgtggaagtttcagatgggagtgaagaaaaaattgacattgaaactaaagatgttgatgataatgatgatgatggaactagaaataaaaaagatggtgtagtggatgataaagaagaacaatgtgaaatcctgaatgaaactacgactaatgaagaacttggagttattgaagaatctgaaaatattcaagaatgtaattttaatgaggaagttcgtattactgaaaatcttggtgttcacgaagaagttgttactaatgaggagcctgaaattaaaagtgaagatgcaactagtgaaaaatatagagttagtgaagaacctgaaatcattgaagaaattccaatagatgaaaaagttgacgagattaaagttaatgaagaaattgaacctaatgaaactgaaattaaaacttatgaagaatctgaagatgggcttgatgatgacggtaatgagaatactgataaaactgatggaattgaatcaggggagaatatcaaggaaattcatgacgctgaggaaactgcaggaagtttgagtaaagaagatgatggggcgtatgaacacaaggataatacacagtatataaaagagtcagttgaaactacaggaaatacagataaaaaggaggattctgaaacatttatacaatataccaaacgtgataatgatttaatagatttatagatacataatttttaccatttacataacatttaaagttcaaataagtaatagtcgcaaatggttttagaagattgtagtcctaattttcagatttttcatctttatcgatgattccaacttcttcagattcaatattatctgatttctcatttggtttaattgataaatcaatttttttgagaacgtataaacccattaaagctaagaaaatgtagaaagcggcatgtaatggtttatgtaacattgcataagtggtatatttgtaacgaataacaattgaaagatttttcatttcatcaactaaattctcaaattcaaacgttacttttaagtgaccagattcaacatctaagtaagaatattgattagtaatagttggttctgcaactgcaaatggtaaagcatagtcaagtaattcagcgccttctggtaaataaatagtaaagttgaccttatcatatgtagaatcttgaataccatcaagaattttggtggtaataatatattcatcatcttgttgtttaacaaattgatctaacttgtaatcccaaccaatggtaaaattgtagttccaaccaccgaaaatagggaatcttggacgaataattaattcattttcataatattgagaagttgaaacattaccaactttatccacgtaataaatagaatcatattgtaaagcctttgaatgatcaaatggtattcttaaagctgtaatagcgtgatgtggtttgttagcaatagattcagtcatatatttagatcttgagaatcctttatctaatttagcaccatgatttgtaagttcataatattcttccaattgaagggtattcgaccaatgggaaacccacaaatctctttgtaaataattaatgtaagttaaaggtaagtttctaggataggtaaatgtaaaatcatgaactgtgttcccttcaattaaatcggaagcaacaaaagaaactgatctttcattttcgactttttcaaaaagaattggtaaatcatctaagttaagttcagtgacagattttgtatttgcaatgtctaatgagtaagaaatagtgtcatatgaagttaatggataagcgtaagtatttaattttataacttgagtcttttccattgggatatgttcaggataaggaaccatttgatttgtaatcataaatgaaaggataaattcaaatgtagaacctggagcaattggatatgggaatttaagatcaaaatatgttaaatcctcatcttgaactggaattttttgaggttttaataaagctctcttaccatctttagttgcataaattgcaaccacaagagttgcatcggaactcatatgttttggtaatccaaaaagatattgaattgcaggttctgaatctatattagtaacttgtatatcatgtctttctttaacgaatgattttccaacatctataactctagaatattgagtattttcccatacctttttaaaaggttggacagccagcacagatgtgacaaatagcaaccagatattcacaaattgagtcaatttcattggtaattggccttgaacagagtgaaaaagtgatgaaaacagatgtaaaatgtgaagcaacgtgtcctaccagttaactcgttgtgtccaaatttcatgacaataccaatatctcctcgcaaaattagaaaaaaaaaactttgaaaaccaccgattttccgaggggggctcgttaactgtgggaaggaaaaaaagttttttttcttcactttgttagctaagagctggtatattatataatgtgaattttttcaagtctggttggtgaaatttcttaacatgaatttcaatgtacttttaagtttgtatagtttttgtgataacattggtaggtgtgggtgccatacaaataaatggggcgtagacaaaagcaaaataaaaagatagtgttttcagacacggagtatgaaactccttcgaatgtgaatgaaaacattgacaataatagtgtaaagaataatgaaattaataataattataatgataacagtgaaagaccatcgaagagatctaaaaaatataatgataataacacaggaagcacagaaaataaactaacgacagaaaatggttacaaaactgtttattttgatgataaatcaactgaaaatgatgatgaatatacgaaagaaaatcctgatagtgatgatgaatttttccaacaagattataatattactagatctgatttaaagaataaagccgctgaattgtatgaaataagaaaaactttaccagttttcaaggttaaagatgatataatcccacaaataatgaaagaacctgtgacaattttaattggtgaaactggttctggtaaatctactcaaataccacatttcttaatggacaaagtgaaaaagaatatagctgttacgcaacctcgtagagttgcagccatgaatcttgcaatgagagttgctgaagaatatggttgtcacgttggtgaagaagtcggttattccgttagattcaataatgttacatcttctagaactaaacttaaatatataactgatggtatgctattaagagaaatgatgatggatcctaaattatccaaatattctacaatcgtagttgatgaagcccatgaaagaacaattctaactgatttattaataggtttcttgaaaggtttattaattgaaagaaatcaaggtgttgtagcaggtgcagaaccaaatttcaaagttattatcatgtctgctactttagatgctgaaaaattttcttctttctttgacaatgctccaatcttatttgtcgaaggtaaaatgtatcctgttgaaagattttatatgaacaaagctgcggatgatattatagataccttggtcaaatctgttgttcaagttaatcaaggagaacaatctggtgatattttatgttttcttccaggtcaagaagatattgataaagctgttgagattcttactaacatttcaccagaacttccaaaagaagctccaatgattgttccacttccattatatgctgcattacctcctcaacagcaaatgaaaatttttgctcccttaaaatcaagacaacgtaaagttattatatcaacaaatattgcagaaacatctgttactgttccaggtattaaatatgttatagatagtggtttgagaaaagttaaagtttggaggcatcaattaggtttatcaacacttttgacagttccgatttcaaaagcatctgcaactcaaagatctggtagagctggtagagaatcttctggtaaatgtttcagactttataaagaaactgattatttgaaacttacagatacaacagaacctgaaattttgagatctgaaattatttcacctgttttaatgttgaaaaaattgggtgttgatgatatattaggttggtattggcttgaaaatccgggaaaagaatctttggtttcttcattacaacaattgtattcattaggtgcacttaataattcaggtaaaattacttcattgggtgagaagattgtgactttaccggttgcacctcatttagcagctgtattgattaaagcacaagaaaataatgttttgaatgatgttattgatattgtatcttgtctttcagtcgataatttgttaatgaatcctccaagtgaaaaaagagatgaaattaatcatttacgtagtgattcgtgtccattaggtactaaccatggtgatttaattatgttgaaagaactctatgatatattcaatacctttaaagaaaatgatgagagaaaaaaatggtgtaaagatatttctgtttcatataaaggattcaagaatgtttcaagaataaggaaacaaattaaggaatatatgcactcattaggttccggatatgatgatgatgatattgaaaatgaaaatgatttcagggatgacaataataccaatatgggtagaactataaccaatagtattattgatgttgattcaatattaaaatcttttctttatggttttatttccaatagcgcaattggtatgccagatagaagttatagaactgtgacgaatggtaatttaatatcggtacatccttcgtcattactttttggtaaaaagaaggatgcgattatgtacattgaatttgtttatactgttaagggatatgctagaaatgtttcagcaattaagttggaatggttacaagaaattgcaccacaattccaaagtagtaaaacaaatgtttccaaagcttagatatttaatttttatactattttatattaaaattaaagacaagatatagatagattatagagagtaaattcatttttttgaaaacttggaattgattgaagtaataaaacctttaggtgatgcttttcttactctgaaaatatagtaacctgtaaccatgatgcataaattaaaaccaatataagcacaaaagaatccgatatttctccatctgtcaccataacttataccaatactttccaagaattgatcaccaatattatattgacaaacttgacaattagttgttgaatttggattgttaacatatcctgtattagtttggaaatattgttcaagatattcaccacaagtcatattttcaagaggctctaaatagttatattcttcttcagagcaaacaactggtctatcgtgtaatgaaatagctaattgattactaacaaaataagtcaaaggtgaaactctccacataaatttccaaaatcctggcataagcataggtctttggaaaacaccacaaaatgcaatacagaaactgaacaataaacccaataaaatatttgcagtgggtaaatctggtgatggatataaaaccattaaggcaaaagatggataaaataattggaagaaaaatgcataattaaaccaccagaaaccggcatgtgttgcgtcataatttagttgaaccgggaaataccaacaaataaaataaatagtaccaaaaacaatacaataaggaagttcattcaaatattgagataaaagtaaacatgaccagtgaaatgtattagatttactttcacgaacttcaaatagttctctagatgaaattgcttgagtttgaatttgattcatcaatggtgcactaataacaatagttaaaaaattagcaaacataacattttgcatgccaataacagtgtatttaatatcccaaaatgaaaaaccaactaataaaccaccaagagttgttaaacccaacttaggcattatatatggaagagaacgatacatttgagtaaaggttctgtttaagacttgataaaattgatatggataactagtggcatattttgaactaagatcttcatcatcaggttgtgcaactgaacttcccttttgaactaaatcagcaacttctcttgtagtattactatattcatcactcgaattccagatttcaaaccaatcatcagtaactgaagcagttgcaccagcaccaataacctctaaaatatattcagcaggattttcacttttatcacaaactctaccaccatgactttcaaaataatcaataacagttcttgaatcagcaccaatatcaccaaaataaacagtttgaccacctttcttcaataataataatctatcaaattgttcaaataatgtagcagaaggttggtgaattgtacataaaattgcttgacctgctttagctaaatctcttaacacttgaacaattgcccatgaagattgagaatctaaacctgaagttggttcatctaagaataataataatgaaggtttagcaactagttcagtggcaattgataatttctttctttgttcaacattcaaaccataaccggaaataccagcaatagaatcagcataatcttccatatctaaaattctcataatcatttcaacatattccatcttttcttcatctggaacacttcttggtcttcgtaatctagcactaaataataatgattctttaacagtaagttcagcaatatgaatatcttgttgttgaacataacctgttcttctttcaaatgatgatcccattggctgaccattgataagcatatcacctgtaacaataccaacatcagtacgtcttgataaaacatttaataaagttgttttacctgcaccagattcacccattaaagcagttaatgttcctggaatgacataaccttgaacatcatctaataactttctctgctctttttcatacaaaactgagtaatcaatatgctgccatgtaaatatatcatttgatcctaatttgtgatcttcactgctactagtactcagcatggtttccatctttgataaactgtcatcaccaatattttccacatcgatattattatcttcctctgcagcaatagaacggaaatgttcaaacattttattggtaatttttgcatttttaacaaataataacttatcagatgatggaatgataggattgaaaatttccacagaaatacatgcaattataatgtaaccaaagataaaagcaaacaatattccaaaatttctccaagcatgactaaaactatatgtaaatgcaaggtcaagataaatatcaccattaacatcatttctaccattatagatttgtttggatgcagcggcaccaacaaaaccacaaacttgattaattcttggatcaatattttgataagacggaccatttggaatcaattgaaatggtgtacatggcatttccaaatgatgaaattgcattgtaatcaaagcttcaaaagcataaagaattggattgcaatatgaaaaccatttaaaccaccaatacattgaaggtctctgaatcatataagaagaataaataaccattgacatcattgtaataccacaaatacccattgcagcggattcatttggcattaatgctgaaagtagtgcaaataaagaataaattgcttgaacaatcaatataacaataaccaaatattggaagaatgcaccggcctctcttttcaaatcaaccaaaaagtaaataacaattgcaaaaataacaatggcagcaagctgaataggaaattgaacaagttgtttagcaagtaattcagctgatggatggtacagtttgtagccgtattgtttatttaaaattggtttatccaaaaataaagatggagtttccgccaatgccataattgcgaaatagaaacatgagaagaaaagagcaccaccccttgaaaatgcaccaacagttgaataagtagtattgtaagccaatgatcccataactaaagcttgtacagttgatgcaccaactaacgtaattggataagaacggtcgttcaaaatgatttcccattttcttttacagcatgcctttaattgagttagatagttgaccgtatatactgatctctttgatgtatgtttttgtttgataagtttttcgttttctttaagtctttgcaatggatcatcaccaccagtgtattttcttaatttttcatctatttgattttgtaattgtacaaattcttttgaatttctccaaagtgcttcaaattcatctgctgtagatggaataatactaatatcgtggaactcagggttaatctttctggcattaggatcagttattgcagtcaaaaattccgaactcgtctcacgagggtgtttcaaaaatcccaaattttcaaaatacgcaacaccttcattggtgggaccaaaataaatttgtctaccaagatacatcactgtaacataatcaaataattcataaatgttttcagatgcttgatagatggtaacaattgaggaattcttgtaaatattggtggatgttcttaaagcttgtacaaattccaaagcagttgatgaatctaaacctctagttgcattatcataacaataaatagaaccaccggtaaccatagcttcagcaattgaaactcttttcctttgaccaccggaaatacctctaacaaaatcattaccaactaaagttttttcaacatgttttaaaccaaataatatctcttgtaaatctttcatattttcaatatattcttttctagttttattatcatacctaatatttggtgttttacaagtaattgcaaaattcaaggtctgttcaactgttaaatatgcaaaatgaacatctaattcaggattataaaccaacaaattgttcatatactttgacataatatccttatcaatcccattatatgataaattaccatcaatacctttataagtatgagcttcaccagcaatagttttcaaaagagttgagcaaccagcacctggtctaccaagaaccaatgtaagagttccaggtgctataaatccagtgacatttcttataatttttcttgtctttggtaattctttgagactatgagcattgttattctttttattttgaattctattatatatcattgcaaatggtttaaagaaaacatcggtaacatctttcaaaacagaagctgcagtatttttaccagtaacagttaaatcttgaaacacaacatcaatttcattcatatcatatccattatccttgttgaatttcacaatatagtttaaaattgattctaaattaaagtcatctttatccatttggaaagtttccatttcatttgcatttttactagatagtgttttggaaagtgtagcaagtctagtcataatattatcctccggatcattagtaactgatctttgaatatgatcattaaaatcttgcatttctaaatctaatttagcttcctccgaagaagtatttttaatggaacctgtatcatctggattccccttcatcatcatttagtataagttagtagtgataatgtgtaagtttgccaaactaaatcaaaaatttacaagccctaattgtatagttaagggcgtcctttccattaaataccccgtaaagaaaacaagcttttgaaacataattcgacggagataacgcctttttttctattttcctttgtttttttttttgtggggtggaggctatgtcaagtcatcaaaaattgtcttggtatttttcctatcataatgattaattaatgaggtgaatctttcagttatgatgtatctattttgagaatacctgaggtgtgaacatggatacatgttatgtagctttatacaaaaaatacatgatatcgatggataaagactaatcactaaacaatatagagtacagaactttttgacggagttaacttccaatatgggtaactaactgatattccgaaagtttagtgaataatatttatctatgttacttttatatataatatagactctatctatctagatgttacattttataaattattgctattaaatgatcaatagtcattcaaactatttttaacataaccttttgctctctgtttttcaatatattttttccataagttattgttagataaacattttgcatcaccacaaatgataaaactatatttagctcttgtaaatgcaacattcattcttcttttatctgacataaatccaatatttccctcactattagatctaacacatgacattaaaacaaaatccatttcacgaccttgaaatgcatcaactgttgcaacaataataccattaacattacaaactgtaacgtttttcttatcagtaatatcttctttatcaattgtaacattagttttaacatgacttggattaataatcttattattttctaaagttttaacaattaactctctttgagctgcataacctgtcataataccaatagttgatggtttaactttatgttcaacaataagtttaacaaccattctttcaatatattcaacttcttttgtattaacccaagaaaatccaaattcttcaccagaaactgaaaatttcttactttcttttgcaccaataccttgatgatcatagaaataaacaggatatttaataccttccttctttctatcttcagctgttataccatcctttaattcaccattataaaattgttctcttgaaaattcagagatatcaggatgcattctatattgtgtatctaacatttcaacattttcatatgtaccattttcaataaccctttgaaataatgacatttctaatgatttaactctagcaaaaacacttaattgtgctgtatcaccaacaaaaataacttttttacatccctttgcacctaatggaattaatgttgatggttctgatgattgagtggattcatccataataatgactggcatctttttaatttcctttaatgatggacctgcaagagttgttgttgttgcaaagataatatttgcttgattgataaattgtttttcgtatcttttacaggaatctaaatatttaccaaattctaatggtttaacgttagaataatccttttttaatttagctccaatattgaaaatattatcaggtaaaacatctgaaatcttatgatgtaaacagactgaacctaatgggtgatctctactatattctttttccttagaagctgaaacaatacgtagaattttatccttatattgtggcattaatttttctgcaatattatcaacagctaaattggaagctgcaacaactaaaattggataatagctcaattgatcaattaattgtaagataatttcataaattgttgaagttttaccagaacctggtggaccttgtaagattgtaattgaattattaagtgcagattgtaatgcagttttttgagaatcatttaaaatattgaaatttttcttgattttattattaaatttaatcttcttaactttagttttacctaaaattaaattaataaattctttattttcaatttgattcattgaattcataactctaccaagaacaacactagcaggaaggaatgcaaaattctcaccattttcattaacagggaatggagtgctattccatgggaatagctttaaatcaaatgatgatgtataactacctctatttgaatatgcatttcttttaactttttcagttttaccacgtttaccacgttttgctaatgtacttccaacaacagttgcagcccaaaattcaggtttagtataccaatctaaattcatatcttcctttctaattatgaaaattggttgatctcttttgaatgggtgttttttcaaatgtgtcatatcttcactaacgtacatatcaaaccatgtttgagttgaacctgtcataacacattctgcattatttttccaagaaagttcaacatcggaacagaaatcaacagagtataattcttcgagtaacaaactataagttaaataatcaagatattcatccatattgtcaaattttaatctgttatctcttggtaatgtatctttaacaatttgttttaatttttcaaatttttgttcaattgataattcttcaggggtaaaatcattataagtgtcaaatctagatggttttgaagctttagatttttctggttgctgttgtttttgttttgaagttttcgctgctggtgcctttggaattgatgatgactgttgttgattgagtcctgtttgagatttagacttagatttggatttagtactttctgtggaaactttctgttgttgtttagctggagctagtgtttctgtagtgcctttggactttttctttttcttttcattctttgaagatgattgttcagttgtatttaatgaagtgactactggttttgatttctctgacttttcagatttcttggatttttcagctttttcagctttctttgacttttcaactttcttggaattttcagagttttcagctttcttagacttctccaactttccagacttctcagatttttcagatgaaccatctaaattaatagagttcttaaaactttcataaacatcatcttcaaaaactttatataaaaataaaggatcatcaaatgtgaaaaatgtttcattttgtagatctttatcatttgaaatacattttgaacaataaggaattatatcttcagaaatttttaaattatcaattgaatcacaacttgtacattttaaacttcttaaacgatacatatgatcaacaaattttaaaactgattcattttgatcatgagagattgaataaattaaggaatcataacctgaatttgctaaacatgatgtacaaacaataccaacattattatgattaattaaaattgcatttaattcattaatttcaatatcaccacatgattgacatttaatagaatcagtcattgaattatatgaaactgacatattgaaatgttcaaattcttcacaatggaaagttgctggtttaaaaccattcagttcaactggacaacaatcacaattaaattctaatgtatcataaataccaatattcaaatctaatggtttatttaaagttaattgattattttcttttgaatctgttgaagttgccgaactttcaataattggactatcctttgatgattcagtttctttatcaaattcagtattatctaatattggctttataactgattcatttgttgtttcttcagttttaatttcagtttcagctattgaatttctttgttcagcttctcttaactttttgttctctttttgtctttttctcttttcactcttacgttttcttttttcttcttcatcattatttaaagttttctcttccttgacttctttttcagatgaaatgattaatttttcaacggatgaatcagttaatggctcattatctgcatcatcatcattattggcgttttcaccattttgagcttctctaagtttcttatttgctctttgtctttttttcttttcattcttacgttttcttttagctgcctcttcatcttcctttgatacaattgcttcttctttcacatcttctgaagtgatagatttttcagctgatgatgcatcattagaaacaacttcattgtcattttcattttcattttcattattttgagcatctctaagttttttattagccctttgtctttttctcttttcactcttcttttttctcttggctgcctcagcatcaatttcttcctttgattttgattcaactacaggtgatgaagaatttacagtttcatcatttttttcatcttcctttttatttttatttctatttctacttcttgtctttcttttagacccattaacagccttctcttctgacattcttgaaacaattgttaccttttggaaaataagctttttgtaaggtcctatattccaaagactgcgaaaatgggatactctcattcttaatgatggaaaactttttttttttcaaatttacaaataaattacgtaattacagatagtttctcttataaaagacttgcttacaagtaaggtatctttgaatcaatattccaattattatcatcaatatcattaggagtttgaacatcaatttccttccaagattctacccaactttcaataatttgtgggaaccaaaaatctccattatttttaataaatgaataatgaccacctaaatcagttgtaaccatataaatccaaggatgtttaattatatctaaataaggataatcagttgaaatcattggatcatccattgaattaataactaataaaggagttttaatgttaaaaattctcagtgcaggtgatgcagcataataatattgtctaccacttggtaaattaactaatttacaagtaaattcatcatcaaattcaactgtatgtttaatttttttcttcaaattatcatatttttcttgagtgaatatatcgggatcttcacttaatactttcatattatttttaactaatctcattaagaaaaatgtaactgaaggttcaaataaataatgtccactaactgattcagaaatatgtttcattgaagcatttaaatcccaaggtgatgaaattgtaattgcacttgttaataaagaatttttaccttcctttgctaaataattaacaatttgtaaaccaccaaatgaataaccaattgcatgaaattgtcttcttttattatttgaagaatatcttttatgtaatctatgtaaaatatatttcaaatcatcagttgataaacctgtataaagataaggagttgttattttagaacgactacaacctctttgatttaaaactaaaacatgatgaccttgcatttttaatttatgacaagttgctctaattggtgcttcttgaataccacctgctaaacctggcacaataatactaattggtaaatcatcattaatccaagaattttttaattcattaatttcattatctgtataatatctacaacgtggatgtaatcttggataaccttcaggtaatgtttccaaacatttctttttaaaaaattcattatttaattcctcagttggtggatcaacgacataatcaagagtaaattgacctgcatgtaaatcatcaaattcatctttaaattcaataacttcatcatttgttatatcaataatttcacgaccgaaataaacaggatattgattatggaaatctgccttgaaagtatacaatgtttgtaatgcaccattaaataaataaggtttcagtaaatgttttgaaccatctttaatatctggaattctagttgaaacaaatttatctaatgaaataaattgtttgtcatcggatgataatgattttgattctgttaatggtttcaaaggtaatttaattgcattatctgaatgataagcatgaactgtatttctaaacccccaattaggtaatgcaaacattgtcgagtgtataagataaagaaagaagtaagaagtgataaagaagaatggataatggaataatttaagtataccatgaatttcacataatgggaccctccaagcctataaataaataagttgaaatttcaaaataataatcccgaaattcagccgagtatgctatgttacatgctaatattttttcattttattttcttttcatttcattcattagagcaaaaatttaattaaacaagtatatgatatataaataattaagtaatacataaattaagcttcttttgcaggatcatattgatttggtaaaggaagtggacgaatagtgaaataagcatttgatttatcaactaaaccggcaagcatattatagaaacctataacaccagctaaaattgcgaaaaatccaccagctttgaaaactaaaacagatgaagcaaattgagcaattgtaaataataaaacaaataaccaaatgaaaaacattaaaacagttaatgcaacagttgatttaaatgtacaaatccataaacaaaatgagaataaagcccaaggtaaaaagaatattgcaattgattgagcatattcattttcatttgaataactttcagcaataccaccaacattcattaaaacaaatgcataacttgaccaaaatccacgaaacattaggaaagtacaacaagcccaagtattaccaattacaaaacataaaacaccaacaataatttcaactaaacctgaagttgttaagaaagcacctaataaagaatttgccatatgaacttctcttgcatgcatttgaactaaacctaaagaaatagctgaagcactaaaagcacctaaaccagctggaacaggatttgcatattcaattaattctctagttttctctcttggaccaacttcgaaagcaccaccaaatgccagagtaaattcttttttattaattggtatatcattaatataaatatgatcatcatcatgacggaaagatttatttgtataagattgaacaacatttggtaaatgatctttatcatttgttacagccgttgaatctagactatgtacagaatgattgttattattgatattattattattatggttttcattaagatggaaggaaggaggatttgacattgtgtgtgtatgtgtatgttataaagtgtgagatgtgttaattataataaattataatacaatataataagatacgatacaatcaaacaaaaaataagatactagattaaagaataaatggtaaataggggtatagtaccctttttatatccttattaaaataaaggatagcggaaagagggtagtttaagggcatttaaagggtaatatagggtaatatagggtaaatttcccctctcaagagatataatcagctgttaatacactgtataatagaatatacaccccctatcgtactccgaatagaattaatagttttaaaatactattaaaataacttaaaatttttttcaaggacaatgcggggtggtttattttcttttttattttttatcattttttattactataggagggggtgtcattttatgtcattttatgtcattttatgtcattttattatggttattagatcggagtccttaaataagataattatattgtattacgtaatggtcacgtgactgtagacgcgactgactgttttatttttatttttattttattttgatgatgtaatgcaagttattttattagtattatctaataatcaccaaatgtcaacacacaacatgtaattttttacacttcaggaattggatcaataaggattaataagtttttaagtttttcattttgaccttggatttattacagtcatctatttcaatctttatattacagtataatattaaagtatctttatattattaacaatagtatatataacatatacttcactatataatacaatatgtcattttttcaaatgcttaaatatcaagcaactaaaaataaaaatattaaaataatatcttcactatgtttattcatattcttatattatttaatatcttcttcaaagaataattcagattcaaattctctaatattagaaaatagaaaaaattctccctatatttattctgatactaattctttaaataaaaagaaaaaaaaatggttccctcaaaatttaccaaataatcatatatctcattatgatttaaattctgttaaaacaactaaaaatcctttacaaaataatgaaaaaatcttaattttatcaccaatggctaatttccatttacaatattgggaaaatttacttaatttaaattatccaagagaattaattgaattaggttttatattaccaagaactttagatggtgataaagctttaaaacaattacaaatagaaatttctaaaattcaaaattcaaaagatgataatattaaaaaatttagtaaaattacaattttaagacaagataatgattcacctgagagtcaacttgaaaaggatagacatgctttacaaaatcaaaaaaagagacgttctcaaatggcaactgctagaaattcattattattttcaacaattggtccattcacttcttgggttttatggttagattcagatattgttgaaactccaaaaaatttaattcaagatttaacagctcatgataaacctgtaatttcagcaaattgttatcaaagatattatgatgaaaatgaaaagaaaaattcaattagaccttatgattataataattgggctgaaagtaatgaaggtttaagacttgcagcaaatttacctgatgatgaaataattgttgaaggttatcaagaaattgcaacttatagacctttaatggcacatttttatgatccaaatggtaatattaatgatgaaatgttccttgatggtgtcggtggtacttgtttaatggttaaggcagatgttcatagagatggtgcaatgttcccaaatttcccattttatcatttaattgaaactgaaggttttgctaaaatgtgtaaaagattaggttatgaagttattggtttaccaaattatttagtttatcattataatgaatagtttatatagtatatatataaaatatagctatttaatcagtataatattaataataataataataaataatctatagataacaaaaatctaacaaattccttatctcatctcacttattggaaactgtgggtttttttaaattaattaattaattaacttaactattatcgttatcaacccatattcatctacatttctttcctttaatccatcaagcagatataaacacccacatacatattaaacacaaataaatacttctaaacactacaatgaatgaaccaattccatcaaatatggatataattaatgttcttaaaaattcaaatttaaccccttctcagaaagtatcggtgataacagagatcaataacaaaaatcaaccttcaaaaagtatgtataattataattatatgtcttaatatactctctttcttttcaaaaagcaatgttactaactaatatagatctatctcatgtaccttgtaaattttaccgtcaaggtacttgtcaagcaggtaattcatgtcctttctctcatcaaattgatacaacttcagaaactcaaatttgcaaatatttccaaaaaggtaattgtaaatttggtgttaaatgtgctttagctcatgtttataatgataataagaaaaatattaacaacactaataataataataataataataataataatactaatactaataccactcaaaagattactaataaagaatatcaatttaatccacaaaattcccaaacgtttataccttcaattgatgaatattcaaataataacaatatcaatactaataactatagttatcatatgaatgaaacaactttaccaaactcttcatcttcttcttcaaatcaaattcctttattgtcttcaactcttacgtcaatttcatataattctgttccaaataatacttttatgtggaatgctgataataataataataataccagtactaataataacattaatcaactaaataacaatgattttattattaactccaattcttcaaaaaatttgaattcttcaccattatttcaaaatcaacctttaagatcattttctttttctaataccagtccaataaataattcaaatcaaatttatagaccaaatattaattcacaatattcaaatacaaatcaatatccaaatacttatcaatgttcaccaattgatttaatgatgatgtcaccaagttcattatctgttcccacttcaatgaatcaagttcctcaatattcatcatttgttaataatactaatgcaattattgattcagatgatgataataataataatggtggtggtaatgataatgaagatattgattatataccaagtacattacaagatttattaacacctcaagaacttattagaagaaaaagtagatcatcatttggatctaatcctagtagttcaggttttaataaaggacaatattgtatagttgaagaagagactgcattcttcatggaataataaaatttgggagggttactttataaaaatgaaataagtaaaattgtattttaaatagttatattgtcattttttttatatgggagagatttttttaaaaattaataaacagaaatacaaaatgtagataataaaaaaatatgaatatgaatataaaacttgaaattttcttttttgaaatcaatcaaaaaaaaaatagattattatagcaaaacaaacaatagataatgtaataaaatgataaaaaatgattaacgataatcagttttacccatacctcttttaccagagaataaatgttttggcatttggttaccaattgctctatcagcttcacctttctttgcatttctatttctttctcttctttccattttaacaattctttcagcctttgatctaagagcaccatcatcaataccatcatttaatctatcagattgatttaatggagtaataccaccatctctaatttcatcattaattgaaccacgtaaaatatctgaacctttaatatttgaaggttttttacttttagttcttttatcctttaatttatttgtatcatgaccaactaaatacatatgattttccaattcattgaaagttttagtaattttagatcttggcataattgcacgattatttaaatgtttctttaaacgagcatcattaatcattttcttttgtttatctctaatccattgagctttttcacgtatttgattaatttcatcattatcatcattcatttcatcatcatcagaatcatagaaaccttctttctctaattgttcttcttcatcttctaatgcttttaattttaatgcaatttcaggatctaagaaatcataaacatttttaccattaagaatttctggcattatatcatttttccattcttcatcatctaaaatatatttttcctttaaattaatattgaaaacacctgcaccaccattttcaatttcaatatcttttgctaaaattcttctatttggatcatttggatcatattttttcaaatttttaacttcatcaggtatataaggatttctttcaagattatctctttgaattggtttagcaacattaattttattaagaacattatcaattctaccagaaccttttaatttttgttcaattcttgaagttaataatttttcacaagctttatttctaacattcataacattatcatcatttaaacatgaagtttccataatttcaacacctgataattgtttcattgaattaattaaattttgtttttcaatatctaaattttcaattttaattatatcagttttattaataactactaaaactgatttatttgcaaataaaggtttaattgaattaaataatttaacttgactttcaatactaaaaccacattgttcagataaatccataaaatataaaacacaagatcttaaatgagcaattgcataaattgattgcatttcaatattattcatttcatcagttggtctatctaaaatacctggagtatcaattgcttgaaatcttaaatatttataatcaaaatgaccaacatataaagatttagttgtaaaagcataaggttgaacatcaacatctgccttagtaattgattttaaaaatgaagatttaccaacatttggataaccacaaattaataaagttcttgtatttggatcaattgaaggtaatctaccaatatgttgtctaacttgttctaaataaaggaaagcatcttttaattttttaacaacagttgccatacgacctaaagcagctctctttaattgtttacattgaaataaagattgaccaaattttaaaagtctaatataatctcttgaaatttgttcaataaaagttttagcctttgaaactgaaccaagtgaaactttataatgatttttttcatataaagtatccattaaatctctatggaaaggatgtaaatcattaatatttgggaatttagataaaatttcatcaaatttttctataaaaccttcaccagtaaatttaacttttctcatatagaaagctctaattctttgaatttggaaaccttgtctaacaactgttggagtttttctttgagtacgattaagtacgatatccaacatatcatttgaagttggaacactaggtatatctttccaagttaattgcattgttggtgtgtaaggagaagataattataattagtatatacttattctgatcaaaagattaggaaaattgatcaaaataattttttttcacataaaaaaataaaataaaaaaattttttttacatgcccttagtcttattactatactaagcgatatttctttttttttctcaatttgggattctaaattgtaaaatttaaaaaactaataccgacccatcgaccgtatcacgtgatattattacgtaacactagctaaaccaggcacgtggaaagtaaataataaataaaaaaatcgactataatgaaaacaatactaatagattttaatagttactaaactctatttctacagccgcactttaattacctgctatcgattgagaaaaacttcctttatcgactattttaattaataccttagtatatttgagatctcttcttctcgttcctggttttatttttacactttcttcctgtcgtttctttttattatcttatcttatatcttttatcaaatgcaatcatggtctcacgatcttaatacaaacttaatactatcaaataatccatcaaacacatcaaataattcatctaacccttcatcaactttttctaatcattatgtaaattctcccacatttgtatcaacaactcaattatcaaatgatagtaataataatattaatagtattaatgttaatagtaataataatataaattactataatgaaccaatttcacaccctaacaataattatcaaacaaattatatagaatcaatgccattaaaacattcacattcagctcctacagcttatatggattacaataataataataataataataataataacaataacatagtatacaataatacatcatataataataactctaatcaattatatcattctgctggtcaaagatatggttatggttattataaatcgatacctgataataataataataataatggtttttattccaatcaaaataataattcaataccctcatataatatacttcaatatccttatactaataactcatctataatacctcataataataataatattaatcatagctataatatcactactactcgaaataattatagctatattaacaataataatattaataatattaatgataattttacatctaatttaccaatacctctagacaacaatagtaacaataaactatcatcaatatcaattgatctaccaatatatgcacaaaacaattcaaatgaaaattcaatcaatattcaaagtccaacaatttccaattcaaatttaattataaatcctacaaagaaaatctctaaaggaactacaattaataatagaatttgttcaatctgtgggaaaatttttaatagaccatctggattgaaaattcatatgaatattcatacaggtgaaaaaccttttatttgtacttggccaaattgtggtagacaattctctgttagatcaaacatgaatagacatttaaaaattcataaaagaaatttattacttaaaaataataataataataatcctaatcctaatcctaatcctcctaatgaaaatgcattctacatacctatggatcgtaattctactatttaactattgtatatcttattatctatatattaacaaccatcatctcaatgctttgctatcctattaaaattgtatacttaattgctctgcgtcgatgcgtcgcttgttttttgatatttttcagacatttctcagatttttcaaaatttcaatagtaacatgaatttatggacgaattagagtaagtaattgtagagagttgattcttttcaatacactcccctaataaccaatatcaaatacaaatatggctagattaaattttttaggatttgttatatcacaaggtaaaatgaataaaactattaaagttagagttttacaaaaaaaatttgataaaaaagttcaaaaacatttccttcaaaagaaagattttttagttcatgatgaaggtaatatttgtaaagaaggtgattttgttagaattgaacaaacaagacctttaagttctaaaaaattctttgcagttgcagaaattagaaaaaataaaggtcaacaatttttaacttatcaaaaagaggcaaaaattaatgttattaatgaagaaaatgataaaattaatctatttaaattaaagcaagaattaaataataaaaatgttgaattaactgaatctttttacaatgatttaaataagataaaagatttaaaattaaagaaagaattaaatgatgatgaattaaagagaattaatgaaattaaacaaaaatataatattactaaagaaaataatgttttcacaccatcagttaatgaattaagtgaaaagataaatgatttagcaattggtattaaactttcaaatactgttaataaattatttaatgatgaatcaaataatgataaattaaataaaatatttgaaaaaattaatgtaaatgaatcaactcaaaagaatataaagaaaaatttagttagaaaatatattaaaacagctccaataagtgaattagaacaattaggtttatctatttagttataaaactatttgtatagtcttgtatatattacaataaaataataagaataataaagtacagtatagtgtatatgatatgtgtgataaaagatattattaaagctatgtaagtatagatggtatatataaaaatgaaatggagttaaaattggaaatggaaatgagaatggaaagtatgcatttaatttaaaatactatatattatcaactgtatttgtttgatatgcaaaatttaataaactatctaaaccttgtaatttattctccttttgaactaaattaaccggttgattatcattaagtataattgaagatgaattattataatcattaatttcattttcaattaaattttcaattttaataaaattattattatttaatttattaattaatttaaattcatctaaccaattttcattaattataagtaataaattttgtttcttttcagttaaaaattgattaattgaattttctaaaattaaattaaatttatcaattgttaaattatagaaatatttaaattcaactgtattaaaatttggtaatttatggaaaatttcaattaaaaatttctttaagaaattaattgaaattattaaattattctctattggtggtaaataatttaatgaaaattctgataatgattgaaagaaatcattaacaaaatatttaacccttaaaaatgaataatctgaattaatttcaactttataaggtaaattttttaagataatttctaatttttcattaagttgatttaatgcatcatttggttcaattactggtgatagatttaaaattaaattattaatttcaggtttttcattaattaatttattaattaataattgtaatttttccttattaagagtttcaataattctattaattggtaatttttgtccaattattaaattatttatatttcttttccttttaattattctattttgtttattcttaatttgttctaaacttataaaattcattctactattattgtttgatgtttcattattattttcaaatttccttttattaatcatacgttttggtattatattatttcgtgttgaagaattttcattttgtattgggtttattattggagccattctagttaataagaggatgagtgtaaaggagaagaaaagaaaccgggattaagaaataaaaaagaagaaacaggaattgccattaatattgaaaatgtgataagtcactttttctatattaaattttccttattaactttctctctcctcctgtactgtaagtagtaaaaaaaataattagtagtaaaaaaactatgaaggaagcgaggttcgaactcgcgcggacaatcgcccaacagatcttaagtctgccgccttagaccactcggccatccctccagttgttgtttttaaatattggtggtttgacctgttattggtggtggtacttacgtaagcatcttaaagggttgttttattggtttttcattaaagtttataaggttttaatataatttatagtattgaatcaatttcagtttattatcagtacaatgtttcacccaaaaaaacacaaacatatgaaaaaaaaattaattaatttactcttttttaaaaagggcaagtaagttttataattgcaatttcttatctttgttcagaaacacagttttaatataaaaatcaacaatttttacttatttgaagactctataccaaatattcactataagaatgattaaattacaaaagaaattttctaaaaagatctattaattacaaaaaattatagaaaattatcattacccatcatagtttatatacccagttcatcatatatattctagcaaagcctactattacctacgtacgtactatactatattaaatcccctaaattatttttcaaaggaacaattatattatgtttcattaatttgattttattagtcctatatttttcatgaaataatttaactaatctataagataaccaaagatgtagtttattgatagatctattagaagatgatttattagtatttgtaaatttgaatgtaactttttttacaattcctttgtttcttttcgtagtttggtaatgttaaaatacttttacttttcctgttgaaatttcccctttttggagttgaagtaaatgatgaattaatttgtgaatttgataattttataggtgatgtataaattggtaatggaggtgttatcatacctggtaatgtctccaatgtatttgaaccaattgataaatccataatgtattgatattggtattactttattatatattattgctttaagttaataagatagattgtcttattggggtaattaacaattggtacgcgatgagctgaaacttcacattggaaataagcagtatctaaaataccttcaattataccggcagtaaatgattcaattgataatgaattatattcttgagttggtgataggaatgaacttataattggattattatcaattatcataaattgaaattcattatctgatgatttctctaaaccatttgatgatttattaaataatgataaccaaatatcatttgaaataaaatgtaaaaaatctattaatttagtaattctatgtgaagtatttgatttaccatttgatgtaatattatttataaaattattctttgttgaaattaaattaagatattttaatccaattgaataacctaaattatttaatttacgttcaatttttaaaatattgtttgtattcttcatatattgtgaaacaatttccattataaggaattgtaatgaagataatgaaacatttttattatttctataaatatttttatcataaattagagaagttgcattttgatttctacgtaaagtaccaggtgatggcaatggtgatgttggtgatggcattatgtgatgtatattgagagtttataaagagaaacccgtataaaagtaagacttaaatgtcgataatttttgattttgattttgattttgtattagataataatttttcacttagctaatattgaaaatgaatgcatgcatcttttactgttttctcttctctttattcaagggagagtatatagatttagatatagatattagcatatagataatgattacaattagaagggccgaagttaaagatgttgaagcaatgcaagatgccaatttacataatttaccagaaaattattcaattaaatattatttatatcatttattatcatggccaggagcatcatttgttgcattaaatgaaaaggatgaagttattggatatgttttaggtaaaatggcagacgatgatgatgaagataagacaccacatggacatgttacatcattaagtgttagaagaaatatgcgtcgaaatggaattgcaggtgaattaatgaaattatcattaatttcattatatgaagaatataaatgtgaatatgtttcattacatgttagagcaagtaatagagctgcattacatttatatcgtgattcattaaaatttcaagttttaagtgttgaaaaaagttattatcaagatggtgaagatgcatattatatgaaaaaggaattaaaggatgttaaaagggttaatcaagataatgatgatattacaattgatcttatatagttcaagtatagttcaagtatagtttacttatagataaaagataaagatagataaatgtgaatataatttcagaaatagtttaaaggtagcgtggttttttccacatcaatgcgttgggattagacaagacgtcacacccgcatctcgagccaaatgcactctggtcatcatttaaattcacattggtattatctagagaagacatgatagtgtacaactgtacataatcatttccttgttaaaagaaagagaagaaagaaaacagtaaaacataaaataatctactataccttttatagaggaaaatcaaattttttccaccgtttgaaaagagagggtttctttatatagggtttaattaattaattatctacttctttgtgtatgatagtttatctatggacacttggttagtgttagggtctagtgtgtagatgtagagtgtgcattgtgcctgtgtattatctggtccctctggtattgtctctaatagacaaaatgatggaggacgagtttctttattatcactgtcattattattattatcattacctggtataaatgcaccagttgcagatcctggacatacaaataatgtatcatctaatgtataagcctcagatcctccattaatacctccaattgtaccacccattgcagatttacctattggtccagatggtggtacaagtaatatatcaacatttaattgtctagaaattgataataatgttaatggatcaccccttggtacatgtaatgaactacaacatccaattgataatccatctattttaattacactattaggtattggacttattatatctagcatttcatcagaagttccctcttccttctctttctcatcaccatctttatctttatcttcattaaccaatcctaattcaagttttaaaattaatttcgatttattgtttaattctgtaattgaatctccgagaagtaatactttatcaatacgtgatttttgtttaagtaatgcagcaaattgtggtggtaatgatgctgtagatgttggtattctcaaatctgatagtacaactataagcattgtatggtggtatggtggtatggtggtatgtatcgattgaagaaagaacttagtatttgttatctaatcaaattattacgttaatcatattatttgttcatctacgatataacttttacttgatttactaaataaattacattaaatagtatactcgattatacactacactctacatatatacatttacatctacacttcatatcccatacacacacacacacacacacacataccatccaataaccaacaataaacacttaatcagctaaaatttctcgaatattccaattactctcttttcaaatttcactctctctcatttaaatatcgccaatcatctctaataccatcacaatctctttatatctttaacaatccttcatttaacaactaacaaatgtccgcttccttaattcgttccgctaaacttattcgtccaactttagatagagttcttgttcaaagagctgcagttcctcaacaaactgcttcaggtatttatatccctgataaaaatgctccaaagccaaatcttgcaactgttattgctgttggtccaggtttccgttctcaaggtgaattaattgctcctcaagttgctcctggtgatactgttttaattcctcaacatggtggtcttaatgttaatgtcgaagattcaaaggatgatttcatccttttcagagattctgaaatccttgctaaaattgaataattatagttaatttctatagtagtagtatacctgtatataatataatataatataatataatacatttatttatttatttatttattttattgttgaaattactttgataaatccaaactttaccacctttactattcaaaaattcaattaattcaaccatttcattaaattcataataactccatttattaaatacacatttaccaacttcacccatccaaataacttcaccaatttcacttctttcaacaagtaatttcttatatttatcaacacttactctaccaccttcaaaaataacaactcctgatccatccccaccttcactttccctaattgatacacaaactcctttaatccccatctctctaccattaacattaactttatacctattcttaccatcatttaacttccccttaccaacactaacaacacatctataaatacctttctccatatccctatccaatttctcctctcgtttctcttctttcctactccttgcttcctctttcctttgtaaattcatttcatcatgtttagctcgtttaattctcctctcttcttcaattgccatctctaatcctgtacctccaaattttaaatcaacatcaggtatctcatttttaattatacctaatttctctaaatcacgtatcctttcagccttttcacgtcttctaccccttcttaacttacgtctctcctccttcgttaacataactttggcaatctctttatcttctttccaattagtaacaggatgtaaaatatatgatgttatactatcttcatcaatctcggaatcccaccattctttatatggtactttactctcaatattaatcctccataaatcctctcctatacttatgtcctcttcaagtcctaattcttttatacgttcctttttctccttttctaaccttttctcttgaaattctttcctaaatgcatccccataccttttttgaactccatacccactacctccaacgttcttacctaatctaactcttactttcattgatgaaaagaaatagagttgatatcgatctttaaaagaaatttaattcatgtaaaatttttattacataatcaaatattcatttacttacaatcttcagtataataacttatctttaactatttaacgatataaaaataaaaacaaaaataataaaagtaaaaacaacaaacaaaaacaactaagcaaatccaaaaccttcatgaccttctctaatagctaacaataatgcatttcttaatttagtataactttcatattctggtaaatctaattgattaaaacatgtatgagcagttggtaatctatcagtcgacttataaactctatgaatactgaattttgatacaccattcataccattaagttccttgaatccatttaatggaaccttagatgtacctgtaacaaactgtaataattttgccctctcttcactatcaaatgatttaacacttctccaaaaccattcaacttgtggtgatgatggtgaataattctcatatttggtattatttttccaatcatcaacatcaatatctggtaatcctgaaaccaataattctagttcttgttcatcaaaaattgaaattaattctttattaataattgagtaaaatccttcaaggaaattattcatttgatccttaattgaggtaaataatctatattcaacaattaacttaacatattcttccttattctcttcagtgacattgatattacgtccattctcaattaaatcaataatcttatgttcaccataatcttcactctcaactgaaaaggtttcaacaataatatcagtaatatcattttctaacatccaaactaaagatttataatattctaaatctagtgattccatatcttttaaattaacagatttacctaaaatcattttaaagacaactctactaaaatggcaatcaataacaaacccatcataaattgccttaccaataatcataccaataaatttgaaaaatgttaaatgttcaggattaacccaagaggttctattaggatggaatgtactcttatctgatgaaactgatgaaaataacgcataatttggatcaaatatttgtcttgataaaacttgataccattctctagtaacaccacctgcatcaacaccttcttcaccattgaaatgaatatcaaaaatactttttctaattttatcaacaggtttaaagaaaatgtttctatatgaatcaaggaaaacttgatctcttctaatattaatagttaatttttctctaccttcatttctattattattctcaccattttcattggaatgattattatcatcttcttcatgtaacttttgatcaaaataagctcttttattatcaaattctaaaactttactatttctaatcaaaactgagaatggtccactcattaatttaggattacttctaatcatatgattcaaaatctttttatgttcttcagtaaatgtgaaaaataaactttcaattggttccttactaaaatcacgtcctttatcttcttcatatttaagaacatccagcaaattcattctttgaaccttactatgtttacaaacaaccatcaaagcttcaatcaatggcgataatataaatgcaattgaatttttgttttcatcttctcttaagtttcttaaacagtcacttaatgcaccccataattgccccaatgaggagttcttataaagtgattttaattcctcaatgtcatctccataattattatccttagattgatacaagtaatctaatgctgttaaaactcttaataattttgcttggtcagatgcacttgatgaaaattgccccaacgaattcaaatcttcaatatctttatcactgttttgtaattctttgataagttctcttagttctttgacaagcttactacttaaaacagttgctcttttagataactccttaggaaatacaattttagcattctctaagacagataagttttgaatagatacaatagtttgttgaaaaaccttgttagcacattcatctgcaaccaacgtattgattatatgcttcaagctcttatcaggaatattaggtaattgaggagactttttagtagcttcattactagaaatttcttttaacttttctttcattgttggtaatggtcttgttgcaatttgaattgatctggataaaatatccatcaagttagtatcatccttgataactttattgtctaacaagttcaataaaacattaatcgggaatttgaaactattatccttatcctttaatttactctttttagtaataaactttttcaaaaatgataaaccttcttgttcagtcaaaaaatggaatctcatattattttcattttcaagtaaatattgaatagcatcaatacattgagtagccaatgaaatgatagtacaattggttggaagcgtagaattaatagtgttatttgatttttcattatgattttcattaatagtttcagtttcagtattttcattagtttccttattagccttgagacagatttgttcgtatactgctttgattgatgcttgatctttaattccttcttgtaaaatataaagaataaatgcaatcaaatcagatctagaatgcttactcaaacacaaaaattcaatgctcttaaaaaacagaactcttttgtaatagatttgaggtacaaataacaatttggctaaagctgcaatacctggtttatcaatcattgcaccaaagtatatcctggaagttttctttgttttagaattagcctgacttgagataaccaaaggattgtttgttctgtgcatactaacagagccatgatcacccgcaacattgattccaaatgcattataaactccattgaatataaattcactaccatcactgtcaccaccatcatcatcaccatcatcatccatgccatcatcgtcatcctcgtcttcatcgtcgtcttcatcatcatcatcgtcctcatcatcatcaccttcatcgtgattagtggcagcatcatcatcacccccaaaattaatacgacgtaatctacgtgaattttcattgttcatatcctcctcctcctcatcatcattggatccaatgaagttgatattaaatccgttgttacccatagctaagtttctgatgaatcccaaggcatctcttccacctctctcgattctactttgtgcaagatgttgttcataaacttcctgtctcatatcatcaggtaatgctaacaagaattcgggatctatcccggtaccactaatgtcaacactctcacccccgatatcaacatagataggttcaacaggttcactattagcagcattgctatttctttcttcttgctcagcctctctttgtctttctaattcaagttgttcttctttccacttcttcttctttcttaactcttcttcttgtttttctttacgttttctatcattttcttctttgatacgtttattctcttcggcaataacagcactcttatcataagttaagttaatgatttgaggaatagcacgatatgtcaaattttcgccactatatatactagaaacttcttgccatctttgtaatgttgattttatttcaataacagttgacttggaactcttatttgagaataatggttcaagaactcttctcaaatctaacagattggaagtgtttgattcatttctaccattcataatagtttgagttagttgcataaaagtacgtctagcatcatcattagtagattcagctggtaaaggaatagcactctccctatttgaaaataacagtcttgcaggaatgtgttgaattcttggtccatcaaaaatagcatcattcattgctaactcaccacttctttgaagacgtcttctttcagtatttgaagcttcatcattctcgtcttcatcaccaagttcattcaaccattcttcaagaattgcagagtcatcactatcactacctgaattatcatcatcttcgtctaatgagttgatatctaattcaataacattttcatcaacatcactttcatcttcttcatcagaggcagaggtatcacctaacatatattgtccctcatctgaaatttcatcaccagaaacaaagtctgcttcagcattagaaacataatcctcaatttcatgggcatcaatcatatcatcatctgaatcttcatcagattcataaacaaaatcgatttggttacctctcattctatgcccgtatccctcatcatcagcatcatcttcatcctgctcatcttcgtcactgtcttcatcactatccatcatatcatcatcgtcttcgccatcttcgttactatcttcatcactgtcaataccaatatcaacatcaccatcaccatcatcgttcaattcgtcaatgatttcaacatcagaaccatttccttcgttatcagataaaataatctcaattccatcatcaactaaaaattcttcatcaaaatcatcgtcataatcatcatcttcatcctcaacatcatccatatcatacatacctaatgttgagttacgtaaaatatctggtgcatcttccttatctttttcatcctcttcatcaacgtctacattttcatatgcttcttcatcaacaccagttgtttgttgctcctcttctttgaaagtttcttggtattttaccttcgtgtcacctaaacagcccaataattttaaaatactttctgaaacttgctcagtataaggaaaattcatatccaatctagccattatattagtagcaatacaaccaaatttcttgctgagtaactctttggtaaaacgatattgatcatgagcagtcaattctaaatcaatgttaacaacaacgttattacccatcttatctccacatagttttgaaacaagattaattatatcaacaactctactatatttaattactgagtttttatttgagttttgaatttcgttaatagttttgattaaaatatcaatggtgaattttctagcaaagtttatatcgttatctgatgattttggatcgttgaagtcaaagccaatagcaggagttgatgtgattagacctaatatacaaacagtacccaatgcagtgaaaagctcatgaatatcagatatatttttgtcaactttctctaatgtattgatagtaataaatttatgaattaacatattcaaagcagtagatcgtggtcttttctccacaggattctttgatttcttagagaatgtcaaaaattcagttttacatgaagtgtatgagaaaagtagttcagaaatagcttgaagtaaaaatatagcataagaaaaacttctgttgttttgtttcattgtttcaactgtacctaactctttctttgaatccttcaaatctttttcagattctttttccttcacacatgaaatatccatcatatcctttctactaacgttcattaattctgaaagaagaaaattcatgatatcagcggttttttcatttttcgtatcatttgaagccttattatctatatcaataccatgacgttctaaaagttttatttcttcatcagttaatccagataacaatggtgatttattatgcttattaacttctttaacataacatttttcactaattacctccgtaaatatttccgcattacgatgaactaacgctgaattgtcttctaaaaattgtttcaaatctttacctttgcctctaacgagaacagatttcttatttagtaattgatcaatttctttgctgaaatattcccttaagatataacttgattccactgatcttcttatgatattaatgacttgtggttggacttgagcagaacatttattacttctaatgtaaattatcaaagagcgaattacctttgattgcgaaagaagcataatagtctcatcagacttacataatagtatcaaaaggttagtgatttcaagtaacaattcttcagattttatgtcttcaatatctagcagtaaatccagtaagttactttcaatcttttgatcaacatcttgaatatcaggtggagttaacaagtagctagtgaatctggtttcatgtgatacaactggaactttaggtgcaaatggcacttttgtttcagaaaatattttagtaaataacattaagcaactcggaaaccaaactttatttatgtttttcttttgtaacttagatgcaataaatttagtaaaatcatcaataattgtaaaatatttggaaagtttcagtttgttcaaaatgaatgcaactaatgttaatgttgctgaaagtttttgactttgtttctcatcaccagtttcaaaatccatttctttgatgatagcaataatagggtttaaaacatcttccatacattcagagaatggcttttcaaagaccgacaagattaatgatgcaatattttcagatgattcaggatataattgagcaatggtgatccaatgtaagatataattaggctcttcagtactgatcataaatgacaaatcatccacagtatcaatatcatattttggagaataatcaagatggattgatggaagagattgaggcgtatatttcttgccttcaagaccagataaatcaaatgcatcaaaatgagagtttaatattgaaatatcctcatttaaccaaacttctgtagattcaccaaacagttcaagagctttaatggcttcatcatttgccaaaccggcgtcacataaaaatttgatgtcataatctgatggacttgttgtttcaggtgatattggatataatctacccttaaacttcattctatgagttttaaaatttgtgaacgcagtcttactaatcaaaataacagcttcaattaaaccttcagggattttagatgggaaattcttaagagcattcaaaccattttcagaaaacaattcttggagtaaaacaaagttagaaattgcagcttgaacttgaatggataataaaacttctgatgcatactcacgagcagaattaccaaggtaaccgtacaattttgttgcacttggaattgatcctaaaatattaacagagcccaaatcagcatagatattgagtaattggtcagagacagctaaaaccaaactttcaacatcaattgaaatatattctttatcggcatatagtgtaatagttttttcatcaaaagaacttaataatttgaacatttcaacagtgatatctttgagttttgggaagtgtttattttgaagtacagaaatactgaaaacaggattaacagctgattgatttccattagtagtgaattgattcagataaagttgatttaacaaacaaaaccaaaatccaagctttatttgaatattatctgttttaggagattccaagaatgaaagcatcgtatctgtatacttgataataacaccaacagcaagctttgtgaatgtaccacgattgacttctttagtaagccttttggcataatttataccacagaaactgtcaaagacgtttcttaaccagaattttgttcttgaaaaattaaaatacaaaatggaaatgttcttgaattttgcactattaccattccaatcaccatcattctttgaaggttctccaatttctctttgtttgacagagattgattgaactaatgtaaatgcatttcttgcaacatcttttggagtattgacatgaagtaagacttcttctatagcaagtcttctatagaatctacagagacgttcaactaaaatcaaaccttcttcatcaccaaatacacgtgcgatatccataatcttatttgcttgatatttatgtaacttggagtaaaaatctgataaaacaaacaaaagtgagttagcaatacctaagtttgaaattgtttgacgagctttttcagaaggttccaaagaatcttcaaattgattgaaatatgatacatcatctgctggaaacatgataaaatcatctagttccattaatacatcactaatcttgcaaaacaatactggaagacagtatgacattgtagcttgatcaatccattttataatatttctgaaatggataattgtttttgacagtgaataatcaaaaggcgcatttttcaaagtaacaaacttgaataatttatccatatcaatatgagcatgaagtctcttccaatcttttgaattttcaaacattgaagcaaggaagattaaagtacattgaactatacttgcatcttttgaactttcccatctttctaaaggtttggaatccttttctatgtgaatatttttctcatcttgcccgtgatacagggatccatttttagatttgtaaaaatcaactgcatcaaatgtaacactatctggtatagtattaattaagtttaatacttcttcatcaatagtagccttcaactcaggatgatgtctagaaagctcatcaacggcattaccaaaattaataacattttcaataataaccaactgcttacaaatttcttcatttttgaaaatcttgaacattttttgaataattttatattctttaatttttgctaaaccatcattattcaaagcaattgcattaacaacatcaggtaattctaataataaatcagtatctggaagtaagaatttttcaaatttttcaaggaaagcactgataatacctgcttcatttaaaattgaatatgcagttggttcactattaatgattgtacttataattctaacacaatccataagtaattcattaccaaataatcttggatgatccataattttaattaaacttttcagcattggagaatcatataaatttctcattctgtcaccaggatatgttgtaatcaatgatataactaatttgagaaggaaagtcaataatttaacttgtcttgctgtgattaaatggttctttcttaatgaatctggggcacctccttcaaaatcaggtttatcaatagcaaattggacttcaaaatcaaggagagaaatgataatattaaaaccatcaaatgcaacaaaatcatcaaatgcttcggctgatttctcaataaacatttcaattaaatgtaaaggacccgaacgagtcattctataatcatttcttaagactaagaaatcaaggaaaattttcattaaacctgccgttcttaaatgagttgctaaagatctattttcaatcagatttgccaacaaattgtagaaatagttcatataagtttgatcattattaaatttaagatctttagcctgttttaaaatattttttaaaatatggaaaagaagaccatgactaacattaccacctaaagtcctcattaaatctgatgcaccatttcttctagttgaaatacttacaaatgcacgtaatgtagcaatacaaggttcttttggaacatgattatcagggttaattaaatcagacatatatgttaataaataaggttcatcatcaaaaaccaaaccaacaaatgcactataagcagaattcgtagatgcagctgcaattgcataacatttgaaagtaaccaatttgcctctcaaagctaaacattcgaatgatttcccactatatgcgattgcaatatagacatgtaaaacaaattctgaccatttttccttaggaatcaaatctgcagctttatcaaaaatttgttgaattgacagttttttcaaagcttcagtacttagtttaaatgaacgtaaaccttcacctgaattatctttagtggaatctttcttgctagcggaactagcacgagatgaaatagtagttcctgttttgtagtagtcataactcaattgtttccaatttgacggaacattaaaatcaggtctcatacaatcgtataaactaatatgagtgacgtctttgttggaatgtttagatttactttgtttatgttttttcaatggagaagaatcagtggtttcagttaatgttgagttatttcttgaagataatgattgattataagttttaatttcaataggagttggaccttgagaggtttcaaccaattgaagagggaataatttgataaaagtaatcaaagtatctttatgtttttttgaaagagaaaatttagttggataatgagccgcaaatttttcagacaaacagcagattaacttaattgatgcaattttgatatctaatgaattagaaaacattaaatctgctacataaccatttgaattataaatttctctacttgtactatattctaaaagttgattggaataattaagacatgtgataataatatcagtttcctcttgtggaacatcaattggtaaaataaattcttcatcaagtttatattttttaatatgagtttcaaaaattttatcaattctatttaataaaggaacataatgtttcaaatcaggatgagatccatcccattttttcggatatttagttttcaaatttttcactaaatcagtaattgaacatgaagccaaaaggttcatttccctttcaacatcagaagactataattaaagtaagagtatgatgatagttagtatacttgatctaggtttttcaagccaactggaaaaaaatctgcatataattgagataagaatacttacaatcggaacactttctggatcaaaagagtcactcaattcaattaacatattgaaaggtattcaatagttatattcttgatgaaaaatgggtttagttaaaagaaaatatcagaagagtaagtgaatcttgaaaagactacatttaaaagaatttgatgtgtaaattaggtattatttgccttttcattttttttctaagcgcactctctttggtttatattacgtaaagtttttgtagcattaattatgatcctcttactgtgcatgttagtattctagaatgactattgcaattggtttgatgatatttccaaattaaaacatcgtgtttgagctcttctattgagtatttagtataattgtaaatggttaatatactttaagaagaaaaccaccccccatatacttattgtgactttcaagatcccaagatcccacacgacgcgactttacaaaaataaaaacatgaaaacagacgccaaatctacacacagtgtgcacattaaattgaaatctatatattttttttgctttaaaaacactaacaataaagagttattaaaggtgtaaagtaacgatctatcacattattatacatcacattaagaagtatttgtatatatcagttaatacaaacacaaaaactaatttaaaacttctaaaagtcaagaattatttccagttatataaggtttcagtttgaaagaaatacatagtttgtgtcttttagccactgataagctgatttaataggataaattactacctattgaatacctaattaatttaatatgctcaaaacatcaagattatatattcagttattcaataaaagttttaaagtttacccgaaaagtattttcagtcagatgacagactcaaatttggattccgttccaaaggcccaaataacggtattaaattatgacactgattttgattcattcactgatagctcaactacagagactgttattactccctctcgtaaaaaaccaaaattagagaaaaaagtttcaccttttaaattccttgaaaatgatctaaaatcttactcatataatgaagtatcaatgaaactaaaatctttattaaatgaactaagtgagcatcatacagataagaaacatgtctttgaacaactaacaaatattctagataccaacgaagatttaaatgaaccaatacctgcaggaaaatcacaatattttgctcatacgcaagcatctagtgttactgaaccagttcctgcagctaaagttttatcaattgcatctgctgccaaaattaccgaacaagattcgaatggtttcaaatcacctgtaaatgtcagacctaccaaaagagaacttgattacttattctcatcatctcctgttatatccaaagtaatagatatcccaaatacaaacgctgtatcatcatctccaattatcacaaattatccagaagtacctgttgaatctgaaaatgcagaacctttgaataacacgcaatcatctccattgaaacagaggaaaccagtaataacggaacaaagaagacaatatggaacattgcatatggcaactcaagtacccgatcgagcttcacccactcctaaacccgaagactcagagaagcacgttaaagcaatcactttaagtaaagaacaagaaattgtcatacaacttgcagaaatgggtgaaaacattttttatactggttctgctggtacaggtaaatctttactattaagagaattgattaaaaaattgagagataaacatccagagggaacagttggtgttaccgcttctacaggtttagcagcttataatattggaggtatgaccattaattcctttgcgggaattggtttaggagttggtactccgggcaatatagcagctaagataaagagattagcaacaaaaaaagaactttggaaagatttaagagttttaattattgatgaagtttcaatgattgatggtgaactattagacaaacttaacgttatttctcaaatagtacgtgagaataaaaaaccatttggtggtgttcaagttattttatgtggagatttttatcaattaccaccagtttctaaaacaggtagaatgaaatttgcttttgaaagtgagttttggaaaaatcatattaaaactcaggttttattacaaaaagttttcagacaacaaggtgataaacagttcttacagatgcttcaagaggttagagatgggaaagtatcaccatcaactgtaaaaaaattcaaagcattggaaagaccattatcctcactaggaggacttatacccacaaaattgtttccaactagagtagaggttgatagatcaaatcaccagatgatctctaaattagagggtgatggtattacattcacagctacagatacaggtaaattagcagatacaccacaaggtcaaaagattttagagtcatttttagctcctaaatcaattaccttgaagataggtgcccaagtcatgatgattaaaaatattgattcaactttagttaatggttcattgggaaatgttgttggatttctggataaaacaacttatgaaactgttcaatcaattgatagtgatataagaaagagacttgatacatactcatcaatttttaatagattagtaacaccaaccgtggacttagcggatacaatttttgactttttggcagaatcaaaagcattgttgaaagattcgataaaaaatgaacctgatagtattgaagcaataaatgactcagatacaagtttgttggagtatgaaaaagacaaagatgaagtagatgaagaaattcggtttggaagttcaaaagatgcagttcttaaatcaattgaatcaaaggaacaacttctccgagcattgagggagaacggagatcggaaagttttgttacctttagtatgttttagactgtcaaatggtgcaacaagaacagttgctgttgaagaagaagaattctcagttgaagatgaacatcaacatgttattgtgaaaagatcgcaaattccattaatgttagcatgggcattatcaattcacaaatctcaaggtcaaacactgaaatatgcttgtgttgatttgaggaaaatttttgagaatggtcaagcttatgttgcattatcaagagctgaacatagaagaggtttacaagttttgaattttgatccaaagaaaattacaactaatccaaaagttattgaattctataaaaatttgaaaaatgctgagacatcaatcaataattatggtaatgaaaatagaaaatcatataattctgatgttccaacacaaataaaagatattcacgaacatactgcaactcctgagagatttgaaagatttcgaaaacctcaaaaagccaaaaagcaaaactctggtggaatggatataatggaactgttaagtcaaaccaggaaacataatagtcaatcagataaagaaaatgagccaccacaagagacagttactaagaaggtagaatctgctcagtttgatttatctgctgatatgatgggatctgatgatgattcgacatcatttcaaaagttatttgagaataaatgaataaaaccgaaacatcattgtagtatattaaattagaattaattaagagatatagattatttatgaacgtatagaatagaggtaaagaaatgatttatagaaatttatttaatttgctccaactatccatcctatgatattcttaccaatatcagcaccatttgcattaattaattcatcagcagatgattttattgaacgttgtagacgagcttgaacatctcctaaagaagaagctacattactgtgctttgaagtttcaacatgctttgtagctgtatgttgttgcatagtttccttttcggagttaagcatttgccaatgttcaagaacactattattgaattcagttggagtaataagtaaaatatcactcaaaagttctagatttgattcaatcattacttcaggatattcattcttagttagttgaaaaaatgtgaaccaattttcactaaccaagtcatacaatccatcaaccttgtttttattttggatggcattgttaatcaaatcctttgacaaattaaaagagaaattataatcattaacaactgaaaactctaataaaattaactttaatttaatagccaataaatttgatttatcatcacaagatttatctttattttcttcaaataaatcatcaattttatcatttgataacccatttatcaatagcactagcaaatagtataaatcacctgtataagtatatgccttttcattaagttcaagaatacgtcttattatagtaaatggatcatcacattctataatatcctttggtgtaaccggatggcctgctttgaaataaaacttccaatccattatttttgaattagcctcaattaacaaattcagatttttgtattgttttgagtcatgtggtaataattctgaacatttcaaacaatttttcaaagatccaatatttggatcacagttagttgcattcatatacaatgaccaacaataagcttctattatttcatcaaatctttcctcagataaaaagttaaactcattacgaaataccgtcaaaataaaatcatattgttttagattcaataacttctctaggataacttcacttaatttatcatcaccaattttattgaaaacacgagacttctttaaagtagagtatattgagctaagtaaaagcttccattttttggaactaacatcgccagcaatttcattgttgatatatttagtaacctgttcagtttgtactgattcagatgcattttctaaagctataatgtctatgatagtaagttcattagaatacaatatttctccaacattaataatttcaattaaagcatcaataacttgtcttgtagcaaatgatttgacattttgtagatcaattacacctgtagatttatcttctttaaggttcaatgttttaagtaggatcaaaatttctttagcataaatgaatatttgtaaatttgtcctcgacaatgtataaattatagacacaatgttagagacaaaagagtcaataatatctgatgataacttattcatttctcttaggaaattatcttgtcttaaaatagagagtattataccataattgttgataattttatcagtgtttgtttcaacagaacattttttcccaaattcaaccatccaaccattaaagcaaacccatgagtccattgcatgataacataagtacggtagtagtatttgattacagatataatttgcagattcatcatcttttatacttaaagcaatcatttcaattatttcttcaattgacataacattttgaagttgaattaaagcataattgttttgtaaataatcacatactttactcaatggagaataaaacccatcaatccaatcaagtaattccaaactagcaaatctagaacctttaattaacggtattaaagtattggttatttcataacttgaaaattcatcagtaattcggaaaatccaacttttcatgaagatttgaaataattcagctgcagtcatattatcagtcaaatctaaattatacttataagaatattcatttaaggaatcttttgatttatagaataatttcgattgttgttcatcacttaacgaaatataatatttgaaaatttgaggtatattaccatcctttacatctaacaaggattgaagatcaataatttcatctgtagtttgagcaatttcattattttgtaagtctaaaacttcttctataagtttaactatatcaaggggtttaaagaaagatggtaatgatttaagtaatatttgtaaatatgtcaatatattgagttgaccatgttggatgaatattttaactatagggaaatatttttcaacatctgcaattgaagttgacgttgaaatgtaatattgaagtaaaatctggatagagtgtttctcatcagtcatttggcagttggtcatatgaacagatccttgctgtgatctgagtaaatcaaccaatatataccattaaacttaacaacacagtgtcataaaaaaacacgaattgtcatcgccaaaaaaattctactgggagatcaaactataattactgggcacaaatagaattttccccatgaaaagtaatattttagaagttcatacattaatacattacacacgttcattacatacagttcaatcattacttcaaggaacacttcatgaagtgttggtagtagttactgtatattccaataatctctctgttatcgaacttcttctcttctatccttatggtcttactaatgtttttaactccactcattaatcccaatcgtatccagtttaagcattttggacatttacaatagtaacattttaatctaccaggactttgccgataaagagctgatggatatggtaatgctatatttccaacattttcaatggaaacaactccatgtgcaattgccagatgttccttaaatagattgatgggtatccatctctttgaggaacacattctacaaatacattccattgttttgctaccatctttccttatcctactgaatctatattgtaatgcattttctttaatatcatcatttttaattataccatgatctttcaaatcatcatcacttgaactatttggacatcctaagttaatatgaaagctgaaatctttactattatttttaaaataacttggtttaaaatcatgatgatggaaattttgtggttctaatcttttatcaatgattaagtcatggcattgtaaatcccaatattctactttaccataatctggtattgtatcataatatttagcagtaacatcgtcagcattgtcattaatttctttatcaatatcttcaagaatattatcaccagttgctatattatatgcactgaagtcttttctttctatatcatcattctctacaatatcacttaataactcctcagtaattagtttattattactattattgatattaatgttcaaacctttactaatatactctactataccattctccttttcatcattgctgtcataggaggatgaattcaattgatctacattattattactatttaaggaaatgttctgtaatttataattaatctgatcaatttcttcaatatccaacatttccataccatttactacatctacaatccaatcatcaacacgttctactttatctacagacatttgcaagattaacctagcaaagtaaatttacccccaaagatacagtcaataacacttaataataatggtatatttccaattgccctgttaaataaaataaaatgaaatataaaatacaaattaaacgtaataacccttctcatactctctcaaactatcccatatgcacttgcatagctgacactactgtcatctgcttcaataaccttagaactctgtgcatatccattgaatcttagtgtatgtaatgacttagttttatcattatccccattgatagattcttgcattaataacattagtatacccaatggtttagccccacatattgtattctccgtacaataaatataatctttaaatgatctatatgatccagtcattatcgatttaatagctgctttatctaaactttcaatactcttatagatgggtaatgaatttctaccaattctttgattcttcttaatattcacaatatcatttaaatctcccgtgggggtataaacttcatatgaaaatcttgacccccaatgacaaaaatcagtactaacaataaatgcattgctcttatcttggaaatatggttttaaataattagctatcttatcatcaaattcctctgaactactactaatcataattggtataagtttaacattactaccaaatttcttataaataaatggtaaatgcatttcaaaacaatgttccttttcatcaacttctaatttcatcctcttgaacactttcttatccaagtctgtcaactctttgataacatcaacatcaattggtatattaccaatcggagtttcataataatcacaatcactagttaatacaaatcctttataataaacataatgtgatggccctaaaatgaaaactcttttaatattactagtatctaatgacttatatgtttgtccaagtattgaaccacaatattcatgtcccgcatgtggtccaactgcaactcttgcacctttataactaccatcttcattaattatatcattctttgaattatcaaattctttaatatgatcaatactttcatcatagaaatcactcatatatttatcaattctttcattaagtaactttttatttgctgtataccatgaaccagcatgcgatgcttctctaatcagtggttcgtccatactttcctttcaagaaaatgtgtatgtcctgtctaattaagaaaaaagatgagcccagaccaaaaattgtgacatgttccagagataatttttttacatctctctatttcagtttaggggtcattttcttagcagaatcttgtatataggagttatactataacaatgcgtttgaatagcagacactacattacattccgtaggttctatacagagtcaaaagtattaggtcaagtgaaaataccgagagtaacaaaagataatataggcaatgatactgataaatttatcgatggaaaagtttcaagtgaagtcttaactgaaaagttcagtaaaattcctattgaatcgttaagtaaagtatctgctgaaccattagataaaacttctacagaaacaataacaaatgaaccaagcaaagcttcaagtgaagtattaagtaaacttccaactggtgttttcagcaaaattccaactgaatcattaagtgatgttacggaaataccaaaggaaacatcaaaagcggaaacatcaagtaaaacatcagataaagtattaaccaatgaaccatcagataaagctccaactgaatcattaaatgaagtttcaacagaaacaccaaaagaatcatcagataaatcagaaaccgacgttacaccatcagaatggaaaattaatgcacagataatgataaaagaaaatttacataaatggatatcagaacaagaatcattccctaaaggtactgaatttttcccaattttcgataaaatcgaaaataatccagttcgacgtacattacctaaaattaatgacaaattaatgaatttagatattgaaaaattaactgagaaagatgaaaaggatattttaaactttatgaaggaatatacaagatattcatatatgagaagggaaactgaagtgaataatattgtatgtaaaatttacgataaataccaatcaatacctgagattaaacatgaattttacaaatttcaagttaaaaaaaatcatactaaaataattacatcaattcttaaaaaagaaccacatttaattaatgatagtaatattttgttaacatcatttgaatctgtaactattttcaaaaattgtaaagaaagtttaggagatataagaaaatttactaaaaaattagcaatgaataaagttccaattactaataaattaatttatacattatattacacattaccaatggatgcaaaacattttttcaaaaaggaattattagaaaaaatggatttcaatgcaacagtttttgacagtgattgtacaaggattaaaacatttgatgaaattaaacttttacttaaaaagaaagaacttaaattatcatatggaagttatcatagattagttaatttaatgtgtagagaatttagaattgctgaaggtttatcaattataaattatcttattttaaagcaaaggattgaattacctgtatttttagcaaattatacaattgaaatgattgcagcatattcatcacatttagcaattccatcatcattatttttacaaagaataactggatgttcattaaaatctcttgccatctataaaattgaaaaatttattgcagcttcaaaagttttagataaggatacatttgatttattaaatatgttattacaatcaagtaaatggaaacgtaaagaaataatggatgaagttacttataatatttccaaatgtactaaatttaaaagtgatgaattatttgaattattagaaattagaaaaaaaccagtggatgaattaaaggaatataataaaatcaatgacattttccaaaaaaggtttacaaaaaatgatattgcttttagaccaggatttcaatttcaagaatacgataaaattttcaatttattcccaaatatgaaaaaattcacatatattgaaaaagatatcttagatggattaaaaaataatgattctaaattcaaccttagtgaatattttattgcaaatatttcaccattaagtaatgttaaaaaagatacttttgttagatcatgtgaattaattattgatattttattaaaggaaagacaatatcataaaattgtaccatttgttaattacattaaagaagttaatggtattgatataacatatacaagttatttgaaaactattataagtatttgttccaagaaagaattgtctaatgaatcaattgatgataatacacaattaaaattatcagtaattttagcaaattatttatttattagaccgaaaatgatgattcaagaacttttagataaatatccaattttagtaaaagttctaaataaatcttggtcaagtgaaagtaatatttatgctaaaatgtatgaaagttatgttgaagaagttaaatgggattataatgctccacctgatttatcaattgaaaaatttaaaagtgttaataatagtgaaactaaagaaattgaaaataataaaaatactaatagtgaaagtaaacctgataacactattaaggatttaatttcaaatttaaaatagttcaatacatagtgtatatagtataaagtttaaataatttacataattaatctattaataagtataatagtaatcgtctctaagattttgttgttgtggaggtagaggtggtaattgctgtgatacctgtgactgaggttgagactcaggttgtgtttgtgattggggttgtgattgtgattgagattcagattcagattgagaatgtgatggatcatttgatgtttttttatcattttgataattataatgagtgttattatcatttgattcattatcattttcattctcattatcatcattatcattaggggaatcaggtacttcattattaatttcattattatttgatttatttgatggtattgaatttagagcaaattgacccattttaacagttggtacaccttgttgaataattttttgaatatctttaacaaataaaggatataattgatcacttataccttctctttgagccattattaaagctctctcaaatggtatccaaacaccttttaaatgcattgaaccaattttaacaacatttctagttttttcagcttttaaaataccatctcttctacctcttgtcattttagcaacatttaataattttgtaccattaatcatattattatcagctcgtctaacaactgaaacattatttgcttcaacttgataacataaagttttctcatcttcccacattgttgttgtgatttttggtcttgaacctggtggttgaatttgtccagctaatggatttaattgaaatcttgattttgataattgttgttgttgttgttgttggtgtgggtgtgggtgttgttggtgttgttgttgatgctgatgttgaatatgttgttgttgttgttgttgatgtgggtgttgataatggggatgttgatgaggacgttgttgttgttgataaagtggatggatattatttggtggtgattgaggatatttaagaggcattgaaagtgatggcattgctattggtatataatgaggaggttgttgttgttgttgttgttgtgattgattatgatgttgttgataaagcatttgttgctgttgttgttgttgcaattgagcctgttgttgctgttgatgttgctgttgttgctgttgttgctgttgttgatgttgttgatgttgaaattgttgttgttgcatttgaggatgttgatgtggatgatggtattgttgatgttgatgttgatgttgatgctgatgtggatgatgaaattgttgttgttgatgaggtggaggaggatgttgagtagattgttgaattgattgttgttgtggaggtaattgctgaacatgttgttgatgatctaatggttgtccttgagggccttgactttgttgttgttgatattgttgagggatattatgttgaggttgatgttgaaatctatattgaggattatttgaataagatggaacatatctaccatattgataataagtttgataattaagatcatgtggaaggtaataaaattgtttatttgatgaatttaattgatcatcatttgattgatgtggtggtgaagatgttatgctgttattattcccattattattcccattattacttacataattctcatcataatgatgattaccattaacattaccaataaattgattacccttgtgcattgcccataaaaggaaattgtaatagattataatcttattattgaagacttaatgcaatatgcaaaggaattataataataatgcaacttaaaatcgcgatcactataaaatttattaactattattttataaaaattctgcacataatacacgataaccatgagatacatcaatatctgtttgattatgattatttaatttatttgataaatattctcttttaataccttcataacatacagttacagtatattgttcaggttttaatgcatcaattacattattaattatattatttaaagtttcttcatcattaattggataattagtttcaaatgatgcataagaaaattcactctcgggagttatatgaattgttgtataaatatcatcttttatagaatttgatgaataaccacatggcataaatgcaaatgcatcatgaatcatatcatctaatggtaaaattttattaaatttagaaatttccatcattttaattccattaatatgaccatcaatacctttttcatttctataaaaaatattaacatttttcaaacctgtcattaaaatttctattgtaatatcatttgttgaatttatttgagggaaaagtttatcattacctttattaacataaaaatgccatttatttttaatatcattaccgaaaataaaatcttttgaattttcaattttaaaaaatttatttaaatgatttaattcatcatcccaactttgatgcattaataattgcttttcagggaacataaatgaacgatgagaatagaaaactgtgaaaattggtaattcagttaatttattatttatgaaagttttcaaaatatttaataatttttctaatgaaagtaaagttgttgttgtaccacaagttttcaatataagtttatgtttaaatataaataaagaagattcacttaaaagataagcatgaataaaattatttcttttatgagataaaatttgacaattaacattatttaataaattttcaatttcaatataaggtatatcaaataaagatttattattccaaattgaaaatggtaaagtaaattcatttggagcaaaccataattctaataatttttcaggaccttcaaatgcatcagttgaatctaaattaactgataattgattatctataaaatcttgttccattgtataagtgggtgtttatgattatatgctatatgaatattatgatgaatgttttatgaagaaatagaaatagaaatagaaatagaagttgaaataacaataataataattatgattaacaacgatgaaaaaagattgaaatttttttgataaaaatccattagccaataatgagagagtaattgagtaaatgagggttatttctagttattatactatactatatttatactctacttatactataatgtacatacactatttgatttcaagaagaagagtgtagtgatgagaatgttattagtatcttatcagcctaatactatacataataatactacataataaatcatgtaattgaattactacttgtccatttacgtatttactatgtagagtgttattatatagggggatttaaccgcggtgtattgaattagtatagattgattacgtaatggtcacgtgatgttattttattatatgttaagggtcgatgggactgtattttttatttttttatttttatattttctttgtttttatattacgtaattagaatagaataatacactacaattacatactacatactacaattataaaataaatatcacctaagcatgaagctgtttaatgtaaataataaactaattaaacagcgaaaattcaggttatttgttcttggtacctgtagatcaaatgatttaagaaatgtactatttattatcattgaaaattataataaatgctttaattgataattaaaagtattgaaaaccaatacaaattatcacatttatttatatcttcggtataataaatatttataattgtacatttacaagccctgtggtaatcaaattgttaaaagaagtaagaaagaaagagttggtattaaatgaaagaaaaactttttcatacatagggtaaaatactaatattataggaaaagcgcgtatttagtaagtaataagtaatgaaatttaatagtgttgataatttagtatataatatcagggtttcttatattgaaatgatatttatttcaattggaataaacacttttatcaattccacatctaactgttaacaatgccacctcgttcatctcgtagaactgcctctcctgatatagattatgaatataatgaaaatgagaatgatataaatgataatgataatgatttaaatgataatgatgatgaaatggatattgataatgatgatgatgaaacaaataaagataccaacatggaagtaattaataatgaatatcaaactccaaataatccaaatggtgatttaaaaataaataaatttggtgatttattaattaataaaaaatttaaaatgaaaacttttactttaccaaatgataattcaaatattaaatattcaatttcaactgatgttgctagattagttggttatagagattcttatttccttttccaaaaacatactaatttatttagatttacaatcgatgatgaaactaaattaactttaattaatgatgattatttaccaaattcttttaaaactagaccggcttatcttataactgctagatctgcatttaaagaatttggtcatagattaattattaatggtaaacctggtattgatgattattatgatcaaaatgtagaatcaactactaatacaacaatcccaaatcctacaatcaccactacaacagatatatcaaatccaataacgaaatcttcaatacttgaaactgaaaattcttggatttatgatcattcacttaaatgtcgtcaatttgattcaatgttattatttgatagaaatgaattacttaataaaagagttcaaaaggatatttatacaaatttaaattttacaccttcaataactcaatcaacaaattcaaaatttattaaaattggtgattcatttgataataaaattaaaattgatactttaatatctgataataatttaattaaaactggtttaaaggatatacctttatctatttttcaaggtactgttgatgatgaaactttaaatgcaatattatttcaacaatcaaatgaataatttagttactagtatatttgtgtatagaaatctcagtgtataatattttttttccttaacttcttccttcaaacttcctttccttttgggacaatgaacaacaataagaaatcatttattgaatcacataatgagatttctaaatcaatgtcagtaactgctggtgcattatctggtttaattgtaagattttgtattgctccaattgatataattaaaattagattacaattatttaatgatccaattaaatataattcaattacttcaacaattagatcaatttatttaaatgaaggtataaatgcattctggaaaggtaatacacctgcagaattaatgtatattgtttatggtgcttcacaattttgggcttttacaacattaacaaatcatatcaatttaactttaaatccaacattgaaaaatttatttattggtggtttatcaggttgctttgcaacaactgtttcttatccattagatttattacgtacaagacttgcatcaaatgataaacataattttaaatcattattaaaggaatgtaaattaatttattcaaataatggtataataggatttttcactggtgcttcaattagtatgttttatgttacaattaatacaggtttatcatttagttcatattcttttattataaataattataaattaattaattattcaccaattaatgaattaattgataatattggtggtataacttcaattgcaggtatttcagcaggtataatttctaaaactttagtttatccaatggatttaattaaacgtagaattcaaattaataatactaattggttaattactttacaaaatgttataaaattaaatggttttaaaggtttatatcgtggtttattaccagctttattgaaaagtgctccagcaactggtataagtttattttgttatgaatttttcattaatttatttaaaaaatatccattctaatatatcaatttattaataaagataatcttccatataaccattatcatcaaacatactatcccatttttcaaattctaaaccaatttcaccctttaattttttattaaattcagtttctaataatttattataattccaatcaaggaaatcttctaaattataactaaatttattgaaaaattgataaaaaattttaactaatgcactaacatttggatgataatgattaaccatactatttaattcccaaattgatgaatcaattgcatttgttaatgatggatctttctcattttcatcaaatggatcaatatattttaaatcttcttcatttgttgttgttgaatgaattaataacatacatgttgaatgattatatttttttattaaattataaataaaaggtattataataacaattcctgatggtggtgatgttaatgataatcttgataatcttttaataaatgatgcaacaattgatgcaggtaaatgagttgatgacataaataattctaataatctgaaaaatcttgatttttccttcaaatgtaataaatttggtgttaaaattgcatataaatttgtataaaatgatggatattctaaattatatgatttcattaattcccataatccatttaatgataaaatagataaaattatatcattattattttcaattccaatactatatgttaatgtaaggaaatccattaatttttgtgcattaccaaaaaatggtataattctcttatgtaaaattgttaaaattgatttatattctttctctttcaatccttttaaatttaatatattaatccatgttttctcaaaattattattaaatgtattaacactatatattgtattttctggtgcatttttaataaataatggtaattctgttatattttgtttatcattgatatcataaactggatttttcttaactaatgttaaaagtttggaaaatataattctttcagtttcttcatttaattcatcagattcatttaaaatatttggtaattcttggaaaaggtaaaatcttaaatcccaatatttttcaaaatataattcttgaaattctaataataaataatcatttattgtaccatcatttccatttatttgtgataaatcaccataacataataaatttttcaatattttcttataagttacatttgcaaaatatgattcaccaatatttggtccaagatatttactttcatatttaataaattgcattattttctccaatgcatcaattttcaatgttgctaaactttgagaaaacttatttattttccataatgtgaatatttgattaatgaaagtattatattttgatatcatccatttacaaactaattgttcctcatcagtttgtgattttcttaattttaaaattcttttacttattaaattattgaaaagtgtagataaattaaaaagcagagttctggaatatttcaaatattcagtatccatttcttcatcttcatcagatgatactttatttacaacttcatcaaatgcatttaaaagtttgataatttgattataatttttaggagattccaatatacttgacttaattgattcaatctccttaacagaaagtaatgacttagtgtcaactattttcttcttattcattacactctttcccttctttgccattgtgtatatgcttaactttctaactccaaatccaagacaaaccctgaatctgatgttaaaataaaataaaatttttttgcagtgaaaaataaaaatatttttttttttttgaaattttccaatgtcgggaaccctcactataaaaggaacccattttcccactttttcaaccatttccaatttacagtactttctttcctttcagcagtatgaccttcctagttttttactattatgatgaaaactaggtgttgtctgttgacacactcggcgttcctccttcttaacggtgggaaatgatatccttgtggtatctgggacggtatgagtgacagcgtttggcacaaaattcttgttactataaacgacgctttatcgtacattctgatccttcatttaactatggttggttattactcattctattgtagttttcattctttttacgaatttcttttactattcttttggcaggtctaaggtagatttcaatgggtgtgtcttattagactcaatttctttgttatctgtattgacttatgctagatcaatcaatttcattgtgagctttggaaacaacagattatcagttattattattgttatgaatataattactcactgatagtttgtacgaattttgatattatacattattataatattaaagcttacatttagtaaacaaagtagttataaaatgttccttttcataaacttaatcatcatcaacattgataactggcatctcaaaatcagatcccatgtcatcatcttcatcctcctctgcatcaacttcagagataaccatattattattttctgcaacttcagcactttcaataatcttatcacttaatgatgatccagttgctttttccttttctaattcacgtttcatttcctttaatgcttcagttgcactctctgattcttcattaaatacaaatccatttccttctgttgttaatttttcactaatattatcaactttctgtctcttattttctctttcttcttgttcgatttcttcaactggtcttttctctgtaacttcaggtatttggaatgttccattatgtaatgcttcttcctctaatctttcctcttcttcaatttcttccttttctagttctgcattataatcgtttattttctttggtaataatgggaatcttggattgactaataatgtatagatacgactattagatccaattaagttggaaatcattggaataacagaaatacttgatgatgatttacctgggaataataaaatactttctaataattcaataatttccttattttcattagtaactttaccttcattaattaattcaatattacaaattgaatctaatattgcaaatctaacaatttgtgaaattttaccaggtgataattcacatttagtaattaatatattgaagaattttctaattgttaataatgtactaatatttggttgattaataaataattgtttatgggataataaatcagataatgaaacaacggttttgctctttgattgtttcttattacgtgaattagagttagtatttgatgtattaatcttatcagttggaacatttggttctctagcttcttttaagatcaatgatgattcaactaatctacctaaaattgtcatatcattaaatctttcacaaatctttaaatattcagttgcagtttctaaaatattaataattaatccttcattttcataaataccagtttcatcaactttgattttaccattaattgtcttaactggaattgaggcatctaaaattgctaaaattttataaatatgtggatacatttcaaattggaatttattaattaatgaatttaaaattctgatacctgataatttactttgaataactgatttttcaatcatattacgtgttgaaatatcacgaatgtcacttttaacaggtgtgaaatttgtattaaaacttgttaaaatctgtccaattaatattaaatgaccaaatggaattgaaactgcagttggtgaattaatttcaatatatgataataataattcagttaatacttcaattctttgtgaaactttgaaaatttcaattggtgattcattaatatcaattgataatgtgttaaatatgaaattcattgagcttaaattttctggtagtttaggtaattgatgaaatttatcattataatccgaatcatttgataattctaaacatgcttcataaattgaaataaccgatttcaattctaaaacaatattattaacattgtctttccatgcttctgattgtttctctcttgataaaataaatgaaacatatgctaatgatttcattattaatgaacgtaattcaggacttaatttatttaaattttcaccatcatttaaaattctctttaatgcattttcaaatttcataccaaatggtctaaatgtagttgtattgaaaactaataattgaattaaaacttttaatgaatattcaggaactaatgaaatgacatcaattaatgaagaaataataccagctaattttggtgttaaaacttctctagttaatgttggtttacctctgattttttcaatcacaaatcctaaacattcagttgcactctttaaagtaataagttccttttctgttgggttttcataatttgcaataaaacatttagattctagaatcttaactaatgcagcaatagcatttgcagtattagatgataataataaaactgggtgtaaaagacaaacagttaataatttagtagccttccaacgagtaattgaatgattagattttaataatgtaataactcttgtaacaagaatttgttgatcaacatttgatgattcattgataattgatggattacttattaattctaataataaagttagtgatacctcattaagtttatcttcctggatataaggaataatatgttgtaattctggaagcatttcaatggtttgttgttcagtaaaagaaaaatagtactgaaatttaaagaaaaaaaaatatttttgaaaaacttttctttacctaatacggtaatctgaaaaattcttcatgtaaccaaaagtttgatggttggttactctgccttagggatttatctttagagattttacttaattaaaaaacctcaactaatatacaatggctattacatcagaacagaatatattgaaacaagtagatggttctgctactttccaaatagattcaaccaaagtgatatcatcagtaacaggtccaataaatgttatcagacaacgtaatgaggaaccaacaagtgcatttttaagtatatgtgttcgtcccgctagcggattaccatcaactagagaatcataccttgaaactaaattaaagaaaatcatcactccaatgattaatatggaacaatatgcttcaacagaaattcaaatagttgttcaaatattagaatctggtgaacgtgaacaatttacttgtatggaattatcatgcgctgtgaattccttatatttagcattattaaatgcaggtatatcattaaaggctagttttttgagctcattctctgcttgtaaagatggtaatataattgtacgtccgagaatgaatgaattagatttttctacatctcatcatgttagtgttttctcaattgttgatggtaaatcagatgaattaatttacagtgattcattaggtaaaactacagaagatgaattatttaaagtccttgatgtgatatctaatgatattaataaaattaatgaatcagttagagaaaccatcttacaaggcgttgttaatgattatatttggaaattttaaattctattaataattaataatttatattaaatttgtaaataattcttatatatgataatttaaaaaagataatttgaaatatgtacacagtgtatttatgaaaaagctttaaataaatttggagttatacttataacttaagtttttctaagttagcaatagtttgttcaaaaccttcgatatcagcaattgtcttttccttagattgttggttcttttcctttgcagaatcagatgccttagattcgtaatcagatgaactcataattttttctaaacctgctaatgatttcttagatttttctaatttagattggaatttagaaacttcactatcaatatcaatcatacctttaactaataaatgaacattaacttctggaacaacagaacctaaaacacaaccagatggaatttcagatgcagaagatacaacttcaactttttcaactgctttaattaatgaaacaatggaatctttttgagattctgcgatttcaaagaatttactgttggatgattcaatgaaaacactaccgtttttagtaataccgtattgagctaataatgatctagcacctttggtaatttctaaaactaattcataagcattaacagcttcaacattatcatattcagcaacatactcaggatatttagccttaacaatagttttactagtttcagttgatctctttggtaatctttgccacatttcttcagaaatatatggcataaatggatgaattaatcttaatgcaccatcaatacatgtgtataaagtatctcttgcagattgcttttgagcatcagtaccttctaaaattaagaatttagaattttcaatataaacatcacaaagatcatataaccagaaattgtaaattgcttgagttgtttcatagaaatctctttgttctaatgatgcattaaccttttcagtagttttagttaatttatgtaaaatccatttttcaactaatgattcattacctgataaaccagcttttgcaggtggaacataatcttcgcctaatctcattaaaacgaatttagttgcttggaaaattttgttacagaatttacggtaacctgcaactcttaaaatatctaaattaatatctctaccaccagttgtgtaagcacataatgcaaatcttaatgcatcagtaccacattgtggaataccatctggataagattccttttgaccttgtttagccttttcaacttctcttggatctaaattaccctttaataataatgcatgtaaattctctaaagtaataccagaaataacatcacttggatcaataacattacctaaagatttagacatctttctaccttgagcatctctgactaatgagtgacagaaaacctctttaaatggaacttcaccagttaattttaaaccaagcataaccattctagcaacccagaagaataaaatatcccaaccggtttctaacatagacattggatagaatttagcaaaatcaacagttttatctggccatccaagagtagacattggccataaacctgctgagaaccaagtatctaaaacatcttcatcttgttctaaagtaaagttcttaccagcatataatttatctgccttagcttgagcttcttcaagagttctaccagcaacccagtttttggaatcattagtatccctttcttcaccttcaattttaacaaaataaacaggacatctgtgaccccaccataattgtcttgagatacaccaatcttgaatattttccatccatctgtggaattccttttcggaagtttctggaacaatctttaaatcaccatttttaacagaatcacttgcagcttgtgccatttccttttgagaaacccaccattgaggttttaagtatggttcaataatatcaccagatcttgaacaaattggtaatgtcatttcatgaccttcttgatcaattaataaaccctttgcttttaattgttcaataacaacttttctagcatcgaatctctttaaaccttggtattcaccacaattttcatttaatttaccatcatcagtaaaaatgttaacaaattctaaacctgctctcttaccggtattgtaatcgttattatcatgacctggagtaattttaaccgcaccagtaccgaattccatatcaacagcttcagaatcggtaacaattggaatatgtttaccattgaatggatgaacaacaaatttaccatgtaaatgtttatatctttcatcatttggatgaactgcaacaccagtatcaccgaaaatagtttcaggacgagtagttgcaacaactaatttttcatcagaatcaacaactggataagcaaaatgagttaaaacaccaaattcaactttttcatcataacctggaactgataataaagtatgacctgaaacagttttattttcaacttctaaattagataatgcggtatttaacttaacacaccaattaactaatcttaaatctctataaatggtaccatcatcgaataatttaacgaaagcatcattaacagcggcagttctagttggatccatagtgaaagcttcctttgaccaatcataagatgcacccatgttggtgaattggttcttaatttttgcatggtaaacttctttccattcccaaattttctttataaattcttctctaccataatcatgtctagttttaccttcattagcataaacggttttttcaacaacagattgagttgcaatacctgcatgatcaaaacctggaaggaataaagtagttttacccttcattctatagtatctaataagagcatcttgaattgagacagttaatgcatgtccaatatgtaaagcaccagtaacatttggaggtggtgctggaattgagaaaacaccttctggtttgatttcaccatcttcagtaaattctggttcaaagaagccttccttgacccaccaatcataccatgatgattcgactgattttggattataagaggagaatgaaggatcttctaatgaaactaaaactttcttttcaccaggaacagttttatcaacatattctggagcttcaactttttcaactttcttcttcttttccttattctttgcagcgttctttgcaagttgttcttgtttagctttctttgctaaaaatttagccattttttcagctttagccttttccttttgaatttccttttcagtctttacttttggaacggcttcaccaccttcaacaggtgttgttgctgctggagcagctgctttttgttgttgttgttgtttaatttcttcagacatttgagttgataatgtatgaaatttcaaagatatctgtcttttagtataatttaaatttaaatgtgtgcaggcagttgatcttttatagaaatacctagccaataacataaacgggctttgtgcctaaaataataaatatatagatataaggggatatcaacaatgaaagctgcgtatacaaaagaataccagttgtcaaagacagtataaaattaagattcaaaatcattttcataaatttaaaattcatataatgttcaacagagaaaattcaatgagtcaaagcttagaggaagagacactgaaaaaaaaaatagcggttgaaaaatttatgtttttctgtggtgcacggaactataaaatttttgtttaggtaatattttacatgaaggtttattattagagagagagagagagagagagcagatgaaggatgtaatagcagagaagtacacatgggattagcagatacattattggggaacttttcagattatgattctgatacaaatattgaagtagaggaagatatccataatattgatgatattgatgatgttgatggtgacaatattaattttattgatgtgaataatactacatcttcgaaaaaactacatattcaagatttactaacagaaactgatatagataaaatacgaaatattcgtgattattgccccattttaagtaaattggagaaagtggaagggaaattaaactcatttgaatctgaagatgggaacgtaaataacactgtcaatgtaaatgacttgctaacagaaacaaatcaactgataacagaaatatacaaatatttaaacactttaatgacatttgttaaaataggatataacattgtttggattgatcttgtcaatatcgtgaagaatccaatatactacataaaaatgatcaagaatctacaatttgaccttacatcattcaaggcacatcaatcaaatggtgattttgattttttgcctaaagatcagttactctcattaactatatctttgaattttattctaaaatcgaagaattatacaataccaaatgcacataatcaagaattgatcctagaggcttgtgatattatactacatatcaataacattcaacaaaaattcaaaacattcataacaaacagagctgaaaaaattgcgccaaatatgactgcattgataggatcaacagttactgcccaattacttgcttcactgggattagaaactttatgttctacacctgcttgtaatataccatcaataggtaaatcggttaataattcacatggtttcatcactcaatgtgatattgttaaagatataagtcatcattttaaaaagcaagctattagacaggtatgttcaaaattagtgatgtgtgcaagagtagattttgccaataaacaaagttacaattctcctaataaaaatataaataataataatatcatcggtttgaaatggagagaggaaataaagcaaaggttagataaacaaatgttaccaccagaaaacactaacattaaaccattagctataccagaggataaaaagtcaaagaaaagaggtggtaaaagatttaaaaaaatgcgtgatcgtatgaaaatgtctgaagttgaaaaagcacaaaataaaatggcgtttggtgaacaagaagcaagtagaatggatgcatttggtgaagaaattggtttgggtatgttaggtaagaatacagttagaggtgttgaaaatgttagatcatcgcaattatcaaaaggagctaaagagaaaattgatagttttactagaaaaagacgtaattctgataatgataatgatgagtattccagtaaactagctaaacttgtgtaatgataatagaatgtatagtagacagttagagagtagagatagaaagaatagatcaaaatagaatatgggatcctatttgattacctaaaaggggaaaatgtaaacagtgcgaatgttgatctctttcttctgacatgcatgcaaaacttaaaccccttgtaattgttaatagacttactttatttgaatcaggatttttggttgtttatcaaaggtaatcaatcaaatagagagtcatttgaaactaacttgaaaatggcattaattggtggtatatttaatcgtgcatctaaggatgaggaacagtatgttgatgatttatcaagagatgttgaaagtcttaattttggtactccatcaagtcctagaaggggaagaaataatgtaaatacaacagcagatgattctgcaatgcaaatatgctcaccagagagaagtccacaacatagttatgcacaatttaataaagaaaataccccaaataattcaccttctaaacgtcaatcacctactagatctaatgttttcaatgcacatagcaatgataattacaataataactacaataatagtatatttgaaaacttaaaggccgaaaaagagttttatgctaaagtcaatgatcctaaaactcaacgtttagtttcagcagcacaaatgtatttcttagattactattgtgatttatttgattatgttattaacagaaagcaaagagttcaacaagttgaaaattcattgagaactttaccaaaggaaaaggctgaaatgcaatggagaaattatattggaagagaacgtgcatttctgagaaaaagaagaattaagccaaaacataaagattttgatattataacacaagttggtcaaggtggttatggacaagtttttctggcaagaaaaagagataccaaagaaatatgtgcattaaaggtgcttaacaagaaactattgagtagaagtgatgaaactagacatgtgcttactgaaagagatattttaacaaatacaagatcagattggttagttaaattattttacgcatttcaagatactgaaagtctttatatggcaatggaatttgttccaggtggtgacttccgtacattattaaacaatgcaggttatttaaatcctttccatgcaagattttatatatctgaaatgtttgctgctgttaatgcattacatcaattgggtttcactcatagagatttaaaacctgaaaatttcttgattgatgcaaatggacatatcaaattaacagattttggtttggcagcaggtactatttcaacagatagaattgaatcaatgaaacttagattaaatcaagttaaagatttagaatataaaccaacagaacgttcagttagtgaacgtcaaaaaatgtatcgttcattacgttccaaagatattcattatgcacattcaattgttggttcaccagattatatggcattagaggtactggaaggtaagtcatatgattatactgttgattattggtcattaggttgtatgcttttcgaaactattgttggatatacaccattttcaggtggatcatctgatgaaacatatggtaatttaaaacgttggaaacaagttttaagaagaccacgttatgaagatggtagatatgttttcagtgatagaacatggcagtttatcaccagattaattgcatcacctaatgatagattaagatcattcaaacaaattactgaaatggcatatttttcagatattaaaaactgggaaactcttagaaatacagtcccaccatttataccacaattagataatgaagaagatgcaggctattttgatgattttgaaaatgaatctgatatggctaaatataaagatgttatagcaaagagagcacatgatgaacgtattgcacaaaatagtgttaagggtgatcaaaagaattttgttggttttacatttaaacataagggaaatcctaatactgatccaaataatattattgcaccaatattaactgaaaatatcaactcaacacgttataattcaccattcagtacattatattgatagaattgttgtttagaatgttttgtagtcataaattccaatagtgtgttaaccagcttttaattttcattttgatttttgattttgttttttaggttcttttatattaatatagttttgatactaaaatatgtcgtaataggagtttactgattgacttgacggacaataataataataatgataataataatgctgacgtaattgacagatatagatctcaaactaacaataggtaaatttgactaacatgaatttaccattttacacagaaagtgaatttaaaaaagtgcacacatctaaaaaaaacagattatgactcgagttatagaagtataaaaccccatacagatattccatttctcgtataatgcgcttttcaaaggtttaatttacacatttctcgagtatctaaaatttttctaagcttggatcatgatagaaaagaatttgtttgtaaaatgattaacacatgtgtattttgctatgaatacatacatcatttatagcattagatataatttatgaagaaaggcgaaaaggtaaaagtattggtgctgaatccatcaactaaaaatgtatcaaaagctataaatataatcaatcaacaaaataaaaaagctggaccgttcagtttttcaatacttttaggagatgtctttccttctaaagattctgtggaatcaggtgatttaactgttaatattccaacatattttacagaaggagaacatggatataattctaagattgaattgcctgaaaatttagtacatcttggagagattggagtttacaagctagtaaatggtttaaaaataggttatgttttcggaaatctcaaaaacattacatcaaatgatatccttgagaaatttaaaggtcaaagtattgatattatggtgacatatttatggccagatgctattgcaagggaagaaaatttgttattatctggggatcccaaattggatattttaatatctgaattaaatccccaatactggttttcttgtggtggtgaaagtggaaaatattttgaaaggaaaccttatgttaaagatggtaaaattaccagattcataagtttagcaactatgggtgaagatagatgttggtatgcttttcaaattggtcccatcagtttgaacagtaatcaaactattgatgctacgcctcctccaataataaataaacccaatggagagaaaagaaaattagaattaaatgaaaatgaaaatgaaagttcaatgaaaagatcaaacttttcaaacaagacgaagctagaaataacgccagaatcatgttttctttgtttatcaaaccctaagtttgaacttcatatgattgtgtctatagctaaatatgcttatcttacagtttccaaaggtcccttaactttacctaaacctctaggattttcaggtcatggaatgattgttccaattgaacatttcccaacaatgagagaatatgttaaaaacaaggagtcatctttaaaagttcaagattctagtttattcaaagaaatccaacaatttcaagaaagtttggttgaaatgttcaaaaatttgggtgattattctgtcatcttttgggaaatttcacgaaagaggagtgttcatggtcatattcaatttgttcctgtacaggatatggcgattggtaatttccgaaaagtgttagataaccaaattgaatatgacaaacgtttttatccagagtctttaaaagtaagagagtttggaaatgaagataaattagaggaacttaatgaagttataaataatcaagattatgttttgtttaccatttacgggaaagaaggtataacaaaatacttgatagaattgggtaatgatgacgatagattttttgatgcacaattcccaagaaaagtagttgctgttttactaaatttgaaaaatagaattcattggacaaagtgtattgaaacaaaagagcaagaaagtattcagaaggctgaatttcaaacaaattatgataaatatgatatcatgaaaaatatctgacctgattaatttaatttcataaaatgttcaaatacattgtgtttttaattgtagattttacgttgtaatagttagttgtataaatagtaaattttaattaaaagaaagattatacattatgatgataagaacaaattttgtactcgcttaaaatttcatgtaatccctcttctctattaacatcaacagtttcttttggttaaaaacaagggctatcaacaagtatataatcatttagtcggatgtctgcagtggatctgctagtggatgtaattgatgagattcatgaagcggagaaagttttagaacctggagatactccagatcctacaattctcaaacattataaaaatttatggcaattactgttaggtatatcggacacttcattcgattcatcgaattacgatatgtttgaattaacttttaaaaacagtgatgaagttttcaaaggtattgtctactttgggtcgaatattaatagtgatatttcaaacactgatcaagctgtcggctcagtaaaagattcaaacaaaaatgtttctgtactagattctcaaacagatgaaaactctcaggaaacatcaattagtttcaaactcactatgttcaacaaaatacgatatttattatactcacacgaaagtatggttcaagaactattagatgaatctaaattgatcgatgtgatcattaaacatttaaaaagtgatgttctaaatatttcaaactccgtgaggatcacatctaaaacaaataatagcacatttaacttgtgctatatggaagctgttgatatattagtaaatgatgaagagcttctctcaattccagatatggcgaagttaatgcttcagacattcaaggctgacttcaatgttgcttatttttttaatccaaatgttatactaaaattccagaataaaatagtagatataattaaacgagtttttcaaaaacatgagtttgtcgatattgaaattgataactattatcaatataatcccatttttccaattcttaaacccatatatcgaaatttggctttgaaaacattaaaccaacaaaaaagtaataataataagattgaaaaggcaggagaagctaatgagaaaaaacctctggactctgcaatgttagttgaaattttagagaatgtaacgaaaatggaactagaagattatgtaacagaaatacccgtcactttgaacttattcagtaggatacttgccagttacataaaaagtttaaaagatagtggggaatctgatttcgatattgaaaatgatttgtacatagtattgataaaagaagtggtaatggattgggttgatggatcaatagacactaaacagtttgtttcacaattaactgatttatcattagttccaaccgcaaaaccatacatgtatcaaaacgtcagatttccaactcttcatatgagaatggctttgtatcaagtgaaagaagatttaagaatatatgaaaagtattttactatttggaaagatattgctatacagaaacaagaattgtatgatgcatcaaaagaatgggaaatgaatcggaaaaaggcatattttgaagtatggagaaaaaaataccaaaaggcttcagatttaatgtatattaatgtttcaagtctaagtttgatcagaaaagcattcatttttaataaattgaaaactaagtctgatgaaattgaaaacagagaaaaagactttaagagattgattttaagaaataaattcatgaaaatgaaggagcaatatagaaataatcaaaagatgatgatcagagctgataccatatattgtgaaaaattaaagaagagaatatggaataagttaatgtcaagtaagttgactaaattcccagcacttcaagaaaagtttattctcaaaagaaaatctatatacttcttagaatggcattctaaaaccttgaaagtgaaaaatgatatggtaaaagcagatcaatttttgaaaacttcattaatgaaaacgtattttactaaatgggatactactgttaagccgattttggcacatatgtttcgtgttgaaaaaaaagccgataattacatttatcacaagttctttgataaaataaagaagtctgttgccttaattagaatagaaaacaagcttaagtattttttgaataaaaatttgatcaaaaaaacatttttgaagttatgtcaaataaaacaagtggacgatatttctagaaatcatgaaaaagtaaagtctttacagctgaaaaaagcgcatcttcaagaatggaaaaccagattaatgttactccaaaaagcaaagaaatttgaacaaaaaacattgaaagacaaatactttaaattactcaaacttaaaattttagaaagcaagtttaaagacatgcaagaaaaaaggatcaaggcaaatattttaaaactgtggaagctgaagatattaacaataatctttgaacaagaaaaggatatctctttggtacaaaatcatttaaaaaaatggcgcaataaatcagtggatttacaacaaaaattggctaattgtacatcgttatttccgcagataataaaagcgatctactttgatagttttaaagataagttcaaggttgtagaagctttaaaacttaaagccgatgaatttaaatcaaaaaggcagattataaatgacaaatcgttacttgatcgcatgtttgaattggttaaacagaaatcaaattctataaaggagaaaaatgatgaattaattagaagagttgggcaacatcaaaacaatcaaagcttgaaaatcatatataaaattaaaagcagaattaaggacatggaacttttaaaagaacaagctgatgatacttataaaatgaacattttggtcaaatactataatatatggtatgataagtttgaacatgtaatggatataaatgatattctccaatcaaaactagacagtcaaaatgttgaactattaaccaaatgtatgtctgtttttcagttaaaattgatcaaaattcgaacctctgaatcaaatattaaaaactttactgatcgttgggataaatcacgtaaactgatattcttaaaaatatggagattaaagctacaaaataggaaatctccaacacccactgcaagaaagggtcaaaatccaaatgctgaacatgcaacttccatacctgatcttaatccatatgttgatttggcgccaaaagcaagaggttcgcctatttttcgtccacgtttgagatcaagaatgagatctttaataacgggtgactcctctcaatatgcaattgaagaaagagtggatgacgatgatacaagatcattacttagaactccatttaatgaagaatcatccactttggccaactttcgtacgcctatgtcatataattctggattatccaatgtgttgaataataatgatggtactactttcccttctagatcagttgagcgtgtacgtaaaaggaatttggagatacgaatgaacttatacagtggattaagaaaacctattccgcttaacaacattgttgaagaaacggataataattctaacacgtatagtagggcacctctttttggttcatttgaccaagaaataatagatacgagtacgcctgttagaagatcatgatgatgtagatacagtagggtatgtgttacaataaaatagtgtaaaatatagtatagtgtaattaataaacaattaatttatttcataaaaaaatggtactaacgtgtattaaaaagataagaaaaggtttcagatggttccaaatttattaaaagtcaaatgattcaaaaggaactttataaagggccagtttttgagcatttggagttttgagaatgacgaatctatagttttcttcaccaccttcatgttcaacaaggtcaattaatgacttaaagattccccaaccatttgaaactgataatttaagttgttcagataagacatcgacagggtatgacattaaaccagcaactgaatgggattttgcagttttgatgttatctcttgcaatgaaaccaatcttcatttgattgatttcagctaaaacagccttagtggtccattgagaaatcttgttattgtttttcttgatttcatcagcaaacatattaccttgaacaccgttcttgaatttgactttccaatcattagttttaacttgtaaaagtgaatggatcgcaacatttgtagtagcagtagttgtaaaagcatctagtgatgaacggacaattaatgaatgacccttgtgatcagatgaagcatctgaacttggtaaatgatatttatagtatgcataaccctttggaattgctgaagattcatttattggtgattctgcacctaagtttgaagttctttcacctaatgcaccatttaaaaaatagttagaaacttcatttgcttctaattcaataactgaagcggtagctggatcaagtggagttgaatgttcattaacaggaagaacgaaagtatcatcacgtttgtcgaagaaaattttaccatcttttttagtaacaacaacatcccaagagttgtttgattttggagtacacattaattgagcaataatcgcatcagttatgaaaacttcagcatcagagttggaggcatatttttgcatgttaggatctttagaagtagtttgttcaaaatcaactttgatacaaggttctaatggaattgaaccaactgcttcatattttctagtatagttgtgaatagtaccacaacgaattaaaagttcaggtttttgaatttcaaagtttaattttgataacttattaaattcaatttcagcaacagatttccaactttcttcaacattaatggaagctttttgtgtatttgtatcttcttgattccatttatttgcattccatttattatcaccccatttagatgtttgtttctttgcattagcaccggatgatggtaaagatgatggtttcttttgagtaagttgagaagcaacggtttttttaacattaagacccttatttggttgtctcttattacttcttaaaatagtttgctttggagcaattgattgagttggtgttgcaacagcatcaactaaactaaaacctttttcttcagtttcagcactaaataatttagcagcagatgcaccataagcgtggaaaagatctctctttctgtgggatgaataagcatttgatgcagagttattgaaagactcttcttcctttggagcttgccaatctgcaattttacctaatttatcacttttaatgaatggtgcatatggaacaccattaaaagtgagagattctggaatgtaatcatttggaccccatggatcttcaacaggggtaagaccgagtaagttaaatttaggcatagacatgtctggttgtttgtttggtgttattttagatgtaaataacaataaccaaaggtttattaaaaactttcaaaaacttcacaaaaattcatgttgaaagaaatcaaagtgaaaatttccaatgaaaaaaaaaacggaaatttccagcttttatgtctatacattttccgaggattctgctgattctcacagtggaaaattacttacaagggcaaaatttggctcttttaagagtggcaagccttttgctttaagagagagttgttatttggaattaaattgtttcattattcaattaactagttctattatcaaagatggacggtatcaatgttgacattacacacctcaaaaagggtgaagtttcaatgggaacttccattatggcagttacctttaaagacggagtcattctcggggcagattcaagaacaactactggtacatatattgcaaacagagttacagataaattaacgcaaattcaagataaaatatggtgttgtagatctggatctgcagctgatacgcaggcagttgccgatattgttaaatatcatcttgacatgtacaaatcaacaaatggtaaaaatccaacaactcatcttgcagcttcagttttccaagaaatatgttattcaaataaagatggtttaagtgcaggtattatttgtgcaggttatgatgaaaaaaatggtggtgaagtctataacattccaattggtggttctttacataaacaagattatatacttggtggttcaggttcaattttcgtgtatggttactgtaagaaaaattataagaagaatatgactaaggatgaaactgtggattttattaagaactcattatcacaagcaattagatgggatggttcctctggtggtgttatcagaatgattgtcttaacaaaggaaggtattgaaagactcatattttatccagaagaatacgaaaacttatagagtatatttaaaggatatatttcgacaatatgtatatctatttctattaaatacaatgcaattagtaaatgcgaaatttgtaataatagtggaatcgatctcccagtggaacacgccgacgtaaaacaccaacatgaaatttgaatctattcgagaacatcaacattcaaaatttattgttgaaaccatgatcaattgattcttcttttgaaaaacctttgtctataatgaatagcaatggaaccatttggtagatcttgttatcaatcaaatgataattacgtggtttttaatgtcactaatacaaaaagatgtgtaccaataatacataaacctaaaagtttaaaacctaagttttcaacaaaaacaacacactattgtattcttttctctcctgaaaaaataccacttttagcattagaaatatacacatacttgaactttcatatgaatgatggaggtgagagagttgaaaggttaatttatgttggaaaagcagatacttcagggttatccagttctgacgtcgttaatgtcggtggatttgtaacagagtatttaaattatgtttctggtattccaatcaaagaaataatgggtcaattgaacattgatgaaagtaaaattaataaagaacaacttgacaatcatgatattgacagtgatgaagaagatagtcccaaaaacaatgaaaaaagttcgtataatggtccaatatttttatctgaaactcagaaaaaactttaccttttggcaaaacctgatataattgataagcatgtgcctaataaacacattactggaattgaatatcttaataaattgggcttttcagataaatatttttctgacaagtttattattgagacgaaattggttttgtttacaagagcagaaggtcagtatatttttccagaatcagtgaaaaatgaaaacaagcatgtattagatggaacaaatctattgaaatggtggcttaaaaatacagagaatatcagtaatggttggaatagttgtgaaaaatatttagatgttttgaacatggatgatagagaaatccagagatatttccccttgaatagtaaggattggaaagttggcaatgtttacgatggatcagttagtggtgatctaagtcaagcaatatacaatattccattattacctgatgatcctaaaggtagatttttagaacatattgttgtggaaggaagagcaaagaaattgaattgtaaaagatattggcaagaattagcaatccgacaggagtttagatttggcgctgttgtcggacttataggtataaaaggaaatatcgaaacaaataatacaattggtaaatattcttacgttacagcaaatcatctgaaacaatttacagaactaatcaccagtaaggattattccgataagagtgattggaatcttttatatgatgagattttagatctatcatttatcaaaccgatttttattaagggtgaatggaaaggccgaaaaagaatatatgaagtagattcaaaattgtcaaacaatggaaatattgaccaaaagaacaaaccggtggctgttataaacactttgatgtgtgtcagatcaaagaagaagttgaaggctaaaacaacatcataaagtagttgttaaattataaaaatttgaaattttcctaatttagaaagcaaaggacagaatttgatactgtatttaaaaagaaacattttggaaacatcaactacttttctgaaacaaaatactcatgtttcatctatctatgcttaaaagatatataaaaggatatgataagccaatgaatagcaaagtccaacaagtttaattgtcttcttgctacaacaaaccaaaattaatatgagattagacttacaaaaattatttttcctcagttctgttgtttcattagctgcagccaatgatattgatgatttgattccaactaataccctagaatctactctatcaacagtttatgttacaaaatctgaaaatccaaagtcaatggtcacttcattttacaaaatggaagattttgacgattcaatctttgataaggatgaaatactcaaggaattcaataatcctcctattggatttagaaaaatttatcataatgagactacaaatgccagtggaaataatattttacttgatcatacacttgaacctatttatgatgaaactgaattcaatcctgctacagatattacatttgaagaatttttaagtacaagtgatgctctttcacaacttgattcacattttgaaaaacgtggcttttgggacttaccaattacaacaacttatccatttgttttcaattatttgtattgtccttatccaaacttagcacgtatccaaatgtatgcacgttatttctcaggtccacgtagatatatacttagtctagttgacaagtggggggagacaaaaccagcttggtatagaacagatcaaccatcagtacgtgatatctgtaatgttgcttgtcctcctggtgcaacaccatacactacacttacaaactatcatccaaaaactagaactactactagtgttacccctaatactactacaatttgaaaatttgtttgtcttttttctgtactatgtatactcctctctatatatttatatttttgaaagaatattattaaaattttatcaagaatcattcattgtaaccaacaattaaacatgtatatatcagataccaagcagtcagattggtgtagatcaagatcacattcatgaaaatattacgtaatcaaaaagtaaatattggggaggtgaaaagttacatcaagtgaaaccataacaaaaactagcaaatcaacaacatccatttatttcaatttgttggttcttcttccaattcttcaagtgaattattatatactgaaacatcatataatttaaagatggcttctcttcacgacttgattccaattgtcaataaacttcaggatattgtcaccaatacttccttgacagatcttgacttgcccctattgacagttattggttcccaatctgctggtaaatcttccgtattagagaatattgttggtaaagattttctcccaagaggtacaggtattgtcactagaagacctttgattttacaattaattcatgttgcggcaaatgacccattattacataaatctgattttatttcagatgaagccccaattgatccaaatgaaatgacattagagcaacatctcagaaatcacaatagctcttctaatgttaatgaaattccacctccaactcctgctgaagaatggggtgaatttttacacattccaggtaagagattctataattttgaaaatattagaaaagaaattgaaaatgaaacttctagaattgccggaattaataaaggtatcagtagaattccaattaatcttaagatttattcaccaaatgttttaaatttaacattggttgatttaccaggtttaacaaaaattccaattgcagatcaacctgttgatattgaaagacaaatcaagaatttattgttagaatatatttcaaaaccaaactctattattttagctgttacacctgcgaatcaagatttagttaactctgaagcattgaaactagcaagacaagttgaccctcaaggtaaaagaactattggtattttatctaaattagatttaatggatcatggaactaatgctttagatatattaactggtaaagtctatccattaaaattagggtttatcggtgtggttaatagatctcaacaagatattaatcaacgtaaatcattagatgaatcattagcagcagaaatggaattcttcaactctcatcctgcctataagacaatttctaatagatgtggtaccgaatatttggctaaaactttgaataaaactttgatgaatcatattagagaacgtttaccagatattaaggctaaattgaacacccttatgggacaaactgaacaagaattagcttcatatggaaacttaaacatcatttcaaaagaaaatagaggtggtttaattttacagctgatgaataaatttgctaataacttcatcaactcaatagaaggtaattcaagtgaaatctcaactaaagaattatgtggtggtgctagaatatactacatttacaatgaggttttaggtaattcaatgatgtcaatcaaccctttacaaaacttaaccgttatagatattagaaccgctattagaaactcaactggtccaagaccatcattgtttgttcctgaattggcatttgatttattagtcaaacctcaaattcaattattagagggaccttctcatagatgtgttgaattagtttatgaagaattaatgaaaatttgtcataattgtggtagccaggaattagctagatatccaaaactgcacacaaaactgattgaagttgtatctgaattattaagagaaagattaggtccaacaactaaatatgttgaaagtttaattgaaattaatcgtgcctatataaataccaaccatccaaattttgttggtgcagcaaatgcaatggctgaagttgctgaagaaagacaaaagcaaaaacaaaatgaaaaaataaaacttttaaagaaagaagaagaatcaatacacatacaacagcaaacagcacattcaagaactgaatctcaatcaagtggttcaggtaatggtagaatagcgaaggctgctgcttctgctgctgcatctcatttacataatgaattgaaggagtcttctatattgagtgagctcaaagaaaaccataccgctaatggtacaacagattcaacctcaggttccaaacctgaaaaggaaaatttccttaattatttctttggtaaaaaagatgaatctcatccaactgaaagtgataataagatcgcaccatttagctacccaactgaaactgaaagtagtcaattacaattccatttacctgttgaaagttcaattcaaaaccaactggaacaattccatttaagtgaagaacaactgtcggaaagagaacaattagaatgtgaattaattcgtagattaattgcatcatatttctcaattgttagagaaactattagagatcaagttccaaaagcaattatgtgcttacttgtgaattactccaaggatagcgttcaaaaccaattagttcaaaaattatataaagaatcattgtttgatgacttattatacgaagatgaaacattaatccaagaaagagaaaaatgtgaaaaacttcttgatacctataaagaagctgctaaagttattagtgaagttatgtaaggttttttctgtttattgttattttttaagctgtatatataatattagttctagatagaatacacattataaaattattttataaatgaaaaataaaagtaataaggtaaaagtaaaagaatcttaaagtagctatcgtgatctgtcacaaaaattcaaattttagaaattctcaaacagttagccccatcaccgaggatctggcgattgaacttggtctatttacatttccgtattctacttcctttagtgaatattttttggacaaaaataaagatatcacagcatgactattcccgagttttggtcggaattgaaatcccttgaggttttagaaggaatacgatgttccttccctgaatatgcaaatcggcattatcgaaaacacggacggtttttaactgttggtattgatatatttcaatggattttcgaacactcttctaatgttagtactaatggtgataatatgccagaagctgatacagaaatacatgcagttgtttccggaattgctagtaaactaagatacatgattcaacaaaacgtaaattttgttatcgtgtttgatggtacaatcaaattagagaaaaatcgtaagaaaataagttcagggctgattgatcacaatactgataaacgtatttttgaagcttattataaagataacaagaagaaaatagagaacaatagacatataaacaggcaaaagtgtgtttgtgctctagttgaattactcgaggcatggaatataagttttattcatgcacctggtgatgcagaaacagagttggcacgactaaatgtttcaggtgtaattgatgcaataatatcaaatgatgcagactcttttgcttatggagctttagtggttttacgaaatttctctaaatttacaaaagacttacctgccagttcaacaaaatctgatcatgcatcatcaaagacaactgattataatatcacacctgttgattctaacattatcaaaaaagtgaatttagatgctgataagataatgtttattgcatgtttacaaggggacgactattctaatggtgcaaaaggactgggtatcaaaaaagcgtgggctttggcgacatccaacttaacttctatattcgatgcggttaaaactttcaaatctatttatgtttcaaatgatcccaaaaaaattttacaaggtaaattaccctatgatcgacaaacacgtcttgaattattgagaaggtttgaaaaaaatttaactgatttcctaaaaaatcatggaagagatcttcttacgaaagtatataactcagaagtcaaattaccaagtgattttattattgcaagtcattattatccactttttgctgaaagtctttttataagtgatcagtttagtacggggattgctaaccctgatggtaaattatcgatggaaactttgaaaatacctattcttccacaaccattgtcaataatagctgataatacaggaaatggtaatttaataataaagcgtggaaataataaaaataaaatgattggaaagtcaattctgaatttccaaactttgaagttgaatacagtactaattgagaaccagactgctgaacctatcaactggattgatagactaaaatataaaacattattaaaatggatgcaaacggctaaaaataaaaagaaagaaatggaatatttagctgatgtcttaggaactgtttatttttggagaggtatcattttatctgatttaatggatttaaaggaaaccgatttttttatcaaaacagagaaaactgttgaattaaacaacagtaacgagattgaaacactttatcagttaaaatttgttccacggaaaatctttaaaaaggtattaaagttatctgatagtcctctagatgagaatttaaacaagatggatgatgaaataaaacatgtttggctaccaagatattattttgagatagaaaaaaatggtagagaaatttttgagagatatttgattagtaagtcaccacctaagaagacacccaaaagtacaccacctaagaagacacccaaaagtacaccacctaagaaaaaaacaccaactcaaaagtctactttggatgtactggcaacatattcgaaatcgccaatcaaaattatatcaacacataatagcaatcttttggagatgtctggggcttctattgttgaaactaacaaaagaaactttgaatgtgccgctggatctcctaaaaagagagtaaaaacgatggagtctataaagacaacagatactccaaatactgcaattttgaaagaaccttttgaagaagatgccgaagtttctcgtattttagatacttcagattacgttggatcctctttcattgacgataatgattttaatgaattttataaagatgccaaacaagttgataaagttgaaccaacattactacttgaaaagcttgagagtcctgaaattaaaccacaactaaatagtgaacgtgtgaaagaaaaaaaagaacattccaaaatggcagtcactcgtaatatcagtttgatggattctatgactcgactccctactgttccaggagaatcattagataaaaaagcggataaaattagtgcagtgataagcacagatcctttcaaaagaaaccttgatgattatgaaaatgacacattttcatccaatgatacaatggatatactttttccagaagataaaattattagagaagaaacggaaagaaaccagaaggaaaatgtcactcagagaaaagtaattgaaactactgcagcggattattcagatgatacattttcaacacatggatcaatggaaattttgtttggtggtattgttgagaatgacaaatcacatagtatcaaagaagaagaggaaaagcctctcataaatgcatcacaaaatggtgaggtttatattatcgactcagacactgaaacgtcggtatccgatgtaggtaccctggagatagatctgcttacacctatcaaaaaaacggaagaaaataaatttgtgaaagttgagcaaggtaaaccattggacctcactaatgttttagatgaagttaaagatcaatctactaatacagaagaaagtcatgcacaaaatgatataaagctaccattagatcccaaaaacactacaaccacaaccccattaacggttaccagagaagatattgaacttaaaaaaaattcgcaggttcacgctgatcgtatcagtctaccatcaaactttgacggtagtgaaatcatgttggctgaaaatacggatgatgaagtgatgtgggtcgttccaccaaaaaaagagaacatgatagatgatgatataatttttctgtcataatattatagataatacttcattgattttagtttttattagcctttgctatataataatgtataataccctgttttttaaaaagaaattctgcttaaaagtaaagttacaactttcaaatagacttcctattttcttatatccgatccggcgttaactcactcacatgaaaattacagaaaaaattatgcttattattggaatttcatgttaatgcttatagaatttgcctttgatgttttccactaaagccaaatggcatcatttgatatagaccttaactcaattaacgtacctaatgcatcatctaaagtttttaaagatgattgtatgttttcatttgatacagcttatgatataaatggattagacatctgtatgacatgtcatcaagcattttcacgtggtgaatttcattataccgaaatgcatagtgaattttatggtcataatacataccttaattacaagaaagttaaaaagccaattaatagagacgatgaacaacctttgaaaatggttaaacttgaaattaaagaatcatctgatgatgatttatttgatttgaaaacttcaatttatctatccaatacaaatacaacaatcgaatatcctaatgttgatttaccattgaaagttacacaagcagcagatgcgataattcgtgctacatcaagcgaaaagaaacaagaaatcaaatcatgggaacaagaaattaaaccttgtaaacattcatcatcaattacacaaaaatgtatagaaaacttacaacttaaacaatgtaattcatgtgaacttaatgaaaatttatggatttgtttacactgtggtagtttaggatgtggtagaagtcagtttggtggtgttgctggtaattcgcatgccatggcacatcaaaaagaacatccagatcatgcagttgcagttaaattaggttcattatcatcagatatagcagattgttattgttattcatgtgatgatgaagtcaaagtaccaaatttagcttcattattgaaaacttatggaatcgatatttctaattttgttaaaactgagaaatcattaactgaattacaaattgaacaaaatatccaatgggattttaaaatgtctggagataatgatgaagcatgtaaaccaatttttggcgaaggacttacaggttttaaaaatttaggtaattcatgctatttagcatcggcattacaagtattattcagtgttgaatcatttaaaaaggcatatttcaatcctgatggaataccgttggataaaatattgggtaatctaaaaccatacgaagatttagagacacaaatgttcaaaattggtgatggtttatattcaggaagatattcagttcctgataatgatacaactgatataattaaatatcaacgtggtattaaaccaagtggatttaaatcgttgattggtgaagggcatcctgagtttagtactatgttacaacaagatgcatttgaattctggacttatttaattgatcaacttgaaaagaggaaagttaatggacaattggatcaatcgccaacagattcattgaaatttattactgaaaacaagattaaatgtaataaatgtaatggagtacgtttgagaaaacaattaactgatgttattactgttccaattaagatggaacttattgatatcggaaacgatggtgtgaagaattttcaacaaacgacaatggaggaatcattatcccaatggaattcagctgaatcatttgactatgattgtccaaattgtaaatcaaaacaaactgcaaataaaattgaaggatttcattctttcccaccttatttagtaataaacccacaaagaattgttttagataactgggtcccaaccaaagccgctgtacctattaaattttccgaatctttatcattaaatgaatataaaggtaaaggtatattaactggtgagactggattacctgaagatgaggaaaataaagatgataatgaaattcaatttaatccttcatttattaataatcttatggaaatgggattcactgaagataaagcaaaacacggattatttgccacaggtaatgtaggtattgaacctgcaatgaattggttatttgaacatatggatgatgcaagtatagaattaccatttgttgctccaagtaaagaaaacagtaaacaagcctctgttgattctgaaaaattaaataatttaattaatatgggattcagtgaattattatcaacaaaggcacttattgttaattcaggtaatgttgaagcagcagttgaatggttattcaataatcccgatgataatggagttattgaagtttcaaatggtgatgaaaatggtgtagataaattaaaagttattgaagaggaaagtaatggtaagaatggtgaatactcactcatgggagttatttgtcataagggtacatctgttcattctggtcattatgttgcatttgtaaagaaggaaattgaagggattgagaaatgggttttatttaatgatgaaaacgttgtattagctgttgaatctattttaaaagagattgagacaagtggatatgtttatgtttacaagcgtttgtaggtttggaaaatagtaatattgatgatatttaatttctatgtattaatatgattgtaaatcaattacataatggaacttgtaaaaaatgttctcattcaaaatgaaactgaaaaataataaagaaatttaaatgtcatttgtaattaaagttgtaataaaaataaagttaaaaggcaaaaagggaagtggaaaatgaaaatagtaaaatgaaaataaaaatgaaaatgaaaatagaaatgttttgattgaactttgagcaaagtaattttaagtattatagttgtaaaaatcaaattgtagtgataaagagtttcaattatggtatatattagattttctggttttttttcactttgaatttgaatttaaacttgaatttaaatatgatatgtttatggaaaattctaataaaagcaaagaaaaatagagtatattattatgtaaattatttcttatcagcaattttttgttctaatttagacattttctctaataaatcactattttgctttcttaataaagcaatttcaatatctttttcctttgatttcccataactaaccattcttgataattcatcattttcttctgttagcattttaagctttgaaataattttatgagaaatttcttcttcatcatatctaccatttttaaaagaagttggatttggattcattgagattgcagttattaaagcttcaagtcttgttttagtttcagttaattcagtttcagttaattgaattttttcaactaatttatgatataaatcttcataatttttaggaatttcaaatttaccatttgattcattttgagtttttaaaattgtatttttaaaatcttttgatttttccagttcagattctaattttgaaataataatgtctttgagttgaagtttattttttaagttttcaatttcagatggatcattgttattaattgaattttttaattggttattttgttttaaagctcttgaatcaaattgattaatgttaaaattcttattaatgttattgttaatgttattattaatgttattattgttattattgataatatcaggtttaattttatcatattggaaactattaatattaagattattatgagtttgttggttcatataattattattatgagactgattattaacttgagattgtgaaagattttgattttgtgcttgatttaatgataaagattgctgtgattgttgattttgttgttgtttcatcttcagtttgatctgattagtgaaagtattttgaacttgagcttgtgcttgagcctgtgcctgagcctgagcttgtgcttgaagttgagcctgagcttgagcctgtgattgagcttgatgttgagattgttgttgattttgggattgttggattaaatagtttgaatacgaattgttgttgttattaaagttattgttgctattgttattaatgttattattagttgaccaagttgaattaaggttgttattagaggaagtaatactattattatgagataatgaatgatgttggttattagaattattagtattggtattattattattattattattattattattattattagtattagtattagaagtaaaataagaattttgaatcattgaaggtgttgttaattgagaaagtgaatcattagttgataattgtaacatttgataagccagtggatccatttcaacatttgaaaatttagatttataatcatttggagaagttattgaagaagtaaaagtttgtaaagtattatcataagcagttgataaaggatcagttgaagcagaattagctgctcctgtatttgaagagtttaataaatgagtttgagtgttccagatgtccataatgatgatatatgaagcagctggttaatatgaataaaagtagaataaaagaaaatataataaaaaagtgatgagcctgcaaaatgaattgactaaattaaattaaattaaattgaattacaatcaaaataaattaattttttgcccttcacattaaagttctctatttatccataattcattctaatagatctaatagtatcaatagcccttagtaaatctttaatgcatgttaaatttaaactcactttcctaaaagggtaatttatttctttggaggctcagtaaataatcattacgtaagcgagggaattattttcctattgtttacaatttgttttattttattttcgtgtttaatttagtataggctctgtttaaggtgattttttcattatgaattattatgacacaaatttcatactatttttattcttttgatttgatttttatgttgctttattcacttttaattttccttcctctacttttatattcctctcttttaaatcaatgacaggtccaattcaattgctgagaaataatagtaaaaaattaagaagaaaactttcaaaacacgataataataataataataataatacctataatagttatgaaaaggataatatttcgaaaaaatctattaaatctttatcatcaccttcctttacttcaattgacaattcagataatcatcaatcagattatgataataccgtactaatacttcctcgtttgaataataataatattactaatagacactcaatttcaaattcaaactccttccatcaaaattcggaacgagcgctaaattatttatacgaagatgaagttgatgatcatcatcttaatcataataatgatttttataatcaaaatactaatcataatacccaaaaatcatcgttttatttaacaaatgaatttagaagtgttcaaaacttatcctcgtatactaattatgataatatagataataatatttatgatcatgataattttgctaagcctttatttcagcctctaaataataataataataataacaataacaatcattcatcaactcatagacatttaactcattttattaattcaatcaagcctttaaaaaggaataacaatgaaaatttaaagaaatctaataggaaatcagttgatattgcttcaattcaaagaaattctcaattaaaatcaaaacgtatattatctgattcatcaataaattcaactaataatagtaaaactaaaattagaccaaattcattaatattaaatgaaaatcttataccctcatatccaattcattcaaatatgtcaaggtcaaattcatcccctgttttagatttaacttctaataattttagaaatttcacaaatagtaaaagtgtaacttcattaaataatatgatggatccaactattttaacacttaatagatcaaatttaaaaccttcaacaataactccaataaaaattaatagtttaaatatgataacttcatcacctgcatcttcaagacatataaaattcagtatagatacagataaacctaataataaaattaaaactgatcaagagattaaacttgaaattcaaagggaaaatgattcaaaagtaaaatcagatatggtattcgcagttttctttcatataattagtttaatggttggtatatttgtttatattccgttaactatctcagttaaattaggtatttttccattattcataattattacaatgtttgtcgtgtggtatacaggtattgcatcaatttcattctcattatcgaataatagtttagttggtatttaaaattattttatcacagtcaactttttcaaatttcaaatttgaactccgaaaatactaaacttttaagccgcgttaaactccgaattattttccccaggctattttttgtaccctacgtgggtgggtacactgcatcagactttatttatttatttataaaaactatttattcgaaaattatttatataaaaaacttattcattcattatatcattaattcatattataattctgaaaaatgtgcagcttttggcattttaatattctcttcatttaatccaatcaatgaatttgatgaaatatttctagaaattgaaggtgatgaattaattgaacccagtaaaaatccaactttcctcctctcaaatctttgttcaacaggattctcattctctttatcaacattatccttaaccctttgtaatctagaatctaataaatgtaatccacctccaacatccttactattaaaatatccactgtcagttctttcataaactggtgttaaatctccaacacttgcaacttgacttattgcactctcatatgatggtggtactgttggtgtattattaatttttccattattattattaattgtattattcccattaccatttttaagtgttaatccacctaatgaaaatccagaatctccaataaaagatgtagctcttgataaatgttgtacaggtgataatgtacctggtgtcattatcatactatttggtggtaaattagtattactattattaggtattgataattttgtaccagttttaaatgatggtccataaataattgaattattgttatcatgatttgatttatttggtgatgtgttaaatggatccagtggttcattatcgtcatcatcatcatcagttgggatactaaaatatgctgatctggttcttttagatattaatggtgatgttggatgtgatgataaagattgtgtagttgatgttaaagcattattaaatgctgatgagtctaatggtatagattgaataattggtggtaatgatggtatattacttgacaatgtggctgtgttattattagataatgatgatgatgaagtatgactatgaattgtagatattggtgcagatactggtataggtaatggattattatcagatccaacaactctatcataaaatctatcattataatttggtggtgccattaatttttgtgtatcaccattaatatcaactgaagaatcattttgtgaaaataatatatcttctttattaacatgaattgatgcatcatcatatgaatgatttttaaaatgatctatataataatctattggtttgattttaattggtacaaatggactaataaataaacttattggtaaagttgctcttaattcacttgtatgtccatctttattaagtaatgcaatcgaaaattttaatttatgacgtactttacaaatattttcaatatctaaatcttgtgtaattgtctctaaacttggtggtataattaatgatgtatttatttcccatctatcagttgataatgtcatatgattagttgaatagaaaactccattttcatcaattggtgcatcatctgaccaaatatcaatattatcaactgttgtaattcttggtatatgtttagttgtaatatttttttcatcattataattaccatttaatgttgaaaatgttgcatattgatttaatttgattttaattgcccccaattttaaacctttagctaatggttgcatcataattgatattaaacatgtagatccaattgctattgccttggatggtaacgaaattgaataatcaaccttatttggccatgtattatctaatgcacttgattcagataaatcttgattatccgatgataatgtacgtacaatattaactaattttctcgtaattattggattactaaaccttccacgttcaatcgtacattgaattctataaactaatgagccataagaatgatcaaatattgtttcaggtattgaaccatctaaaatagtttgaaatgggaattcataattcccaggttgaagaactgaatctgaaaaaaatattgatgatgttgatttagttcttggtaattgaggaacatttgttaatgaagtatgtgatgaagagcgtgaatgttgatttaatgataaagatgaattagttttacttaatgtacccgttgtaaatgaatgttgttgagtaaatgatgatgaaattggtgaatgtaaatctattggtgaccaattaaaacaataaactaatttagatgaattattatgaattaatgtaccataaaatgaaagcattattttacgaacatgtattggctctttgactgataaagcaactgttcctgacaacataactgatggtgcttccgatggtacaccctttaaaataatagtatctctataaatagagtctatacgaatatcgaaaagcggtaactttttctgttgcttcatttatctatataatttcgtctatatgtaaatgcaacttcttcctgtgtttaaaatatcaaaagattgaaataaattacaacaatctaaaataacttcaccaaacaccaacaaaagtaacatggataatcaccgccaatgtcaccttttctgacaagtcatgtcgcactattattgaatttgccagctatgcccccccagttttttccctattattattacgtaataaaatgacttctgcatattctacttgttatgttacattcttaaactttactactctggtatacacatgtacattatttaaaattaaatttatatttcatcgtacaatagatgatgtctctagcaattggcagtctccacctttgactttatctagtccgtaaactaaaacttctcccgattctgaaactcctactatacgatcatatgaaagtcccactaatccagtcggagttgatgaacccaatggtaacttacatgaagcaaaatggcgtgaaggttctaaaacacctaaaactcttggtggcagtaatggacccatactttgagctgcacgtcttccaagggtctgtgatgttcgacgtaaaatacgtcccactgaatttgttggagcaggtgttaatgatggattggtgtttgaattagcattggcattaacgttggtattattagagttagaatttgaagatgaagtttgaaaatcttcatctgaactcatacttgctacatcatcgtctgcgacattatgttcagattcattatccattatactatcaccacctacatctccatccatcttaaaaacatgaatagtaccagttccactatttgcaataagccaaccatctgagaacgataatgcactaattttagtaggatatgtgccccgtcgaagttgctttaatttaacacctgattctgcatcaaatacacgaatcaatgtacctctatcacttgctgtagcaatcattgttccatcattattgatggctaaggctgtaacttcacgtctatgtgcagaaataacagcaacagcttctaactttttacaatcaaatacaacaacatcaccttcacatgcatatacaacattactagccatacttaatgctactaatcctttactattggcattgctaacttcaattgtgtgtaaaagtctcattttagtaatatcgtaaatatatagcataccttcaattaatacaaccaacctttctaaattcattttaacagcaagtattgcggctgggaaagttaattcacatattgttgtatgttgttttgtatttatcattctcaatcgtcgcctagataatgcagttaatgtctctccacttcctacaactgcaaccaatgatgaattacataacatttcaacaatacttatgccgccttccatttcttcataacatttagtgaaattttcacattcataaatccgaaatccagtatcgtaacccacacaaatacatgagttatcctggttaaaatttgcataattcaagtgcattgaatgtgtctattattgtatatttaaagacgtgaagatcaaattgctaatattaatcaacccttctaatttaaaaaaaaaataacaatgttaaaatcccacaatttaataccgtgtgcaagccataatgaattttttaatttttacgaccctataataataaggaggtggagtattattttggtgatagtgttacgtaatcgctggttaaccgtttattaacttctattacaagataaatacaacaagatataagtaaagtatacaacaatcggtacaatatacaatctcattgattgatttattcacgcccatggattctcggtatcgttccatgctttacgtgctacactttcaggtgcagttaagtcgaataattcagtgccaagcactgccgatttctctctctctggaactgattcctctgatggaaacacagcttcatgtccttcattacttctattttcattaacagcattatgatcttcttcttcggtattattttcataatcatcagtagaattttcatcaacaaatgcattcttttcgtaataattatcttcatagttatcttcctctctatctccttcaatttcaatttcatcacgaatttctaatggaatatgtggttgatatgcccttaacttcttctcatcaacatgagtaaaatctgctccatattgatgtaataattgggtaagttgaggtaaacaaacattgaaaacttgaccataatttaataatatatcatgcttatcttctttcaaaaatattcccttatcgttcatgttaatattcatatttttactttcctttgattccccccagttattaataggattctcctttagccatttttttaaactcttagaaaattttttttcatcaacttcataatgataattacgtatactctccaccatagaacttgatgataaaatttcaaaattacttatcacatcttgtaaacttcccaagtcttgaattccactaagcacttgtaaccattctgcgagttcaataataggtgataatgtaaattgaccaatattgtataatggattcatataataatccccatcgtttggatctctttcgttaccttcgtatctacacacaccatcaaggtatcctctactttttccaatcaaactatccggaaattctgtatctttttcatcttttggagatgggtgaaggttgttcattctaagccaatcttgaatatatgacaagtttagtctaatttccatgcctttaactcttgaacaatattttttattatttaaaactctgttaaacaaactgcatccaataaaatataatacacttcccaaacactgttgcttaataacatcattgatatgaaataattccaaaacataaaccagtgctcctaaagtttgaatcactttcaatggtgatggtttcatttgttctgtgtatgttggtgggtacagcatatctataatttcatcatatgatgttttatcagcattttgatctttctttttaaaaattttccaatcattcttataaataacattcagatcaggtacactgttatattccaaaatacacgagtcaagtaatccttccagcttgctatctatgctgaaaactaacttgaaaactccactttgcaaacaactgatcaaatcttgaagaattttagggtattttttcaaaaaattacaagcagtatctcttaataagaaataatataaatgattgattgctgaaatccagtaaccaatggtaacaatatcaacatttggctctatgatgacttcttttccctcttttctatctttcttcatttttttctctttctcttttctttcctttgcaccacaaaattgaactatgccacttttcgtaccaatgacatttcttattctggtaagataaagatcgactaaagtttcaaccatcttaccgctggccattttactttcggcatatctcaaacattgaaatataatggatgatggatataaaggtttattgtgatacttttgtggtaatttaaacacatagtccataattgctctaatgttactatcatggaatttgatatattggtttttttgaacataattgaagttgaatgtttcatatagattgctgtcaaatacatcttcatcgtttataaatttgttttcttcttcttcatttgttttatttatatccataccttttaaaaaatcatccgccagttctggagttgtagatttttctcttaaatatccatggattttatagtactcttcacattttgatccttttttaatcaactcaattgcatttttcatacttttgccaactttcttcaatgggtcagaattataggaaattaacctttccacaagatcaacaaaatcaagatgggtggcccacataactggagtccaaccaaccaaattatcagcctcgttacaatcaacattaaaagtcagcagtaaatctacacattcattgttatgaaatacaattgcataaattaatggtgttagtcccttaccatcggctttattcaataatcctttattctctgttaatatattcttaatactatatacatcattgtcagcacaggctaaacaaagttgaacgataggtaaaactgtatctttattgtcagcaagtaattgtaatccctttttagctgctaaaacttgtgaataagtaatatcttgtgatgtgaacaaagcagttgctgctccgatagtgttccatggatccataagtactctctagtagatctttatatcaccttcactgtgattatcgatacagattttgccaaaagaacaaagacatcaacaatttgaaaaagttcatcagtcgttctgcatacaaaaatgtcagcccgcattagcatgataatttaaaggttggctccatggagtttattcacacaaagatacggtttacagttactcaaaatacatgaactcatcagatgatagtgcagaaatgctatcacatagacattttgatgaaagattgaagtcgagcttgaaataccccaaaaagaatgaactattcatagaatatgaacaaaattcaaatacatcaaaatcactcttcttgagcacaccatctgttcaatggcacaatttaagtaaaatatcagcattcttatatgattctaacaatggtgtatatggtaaacccatatgtcaaagactttcagaaatttacatagtaatcgggactttaaatggatatttactattatttgattacaagcaaaatctagtcaaggaattaaaaccattcgacttttcctcaaaagtgttaccaaaatcaccaccgatcattgatggattaattaccatcacatcaattgaaatttctatggacagtaactatttgattacaggttattcaaacgggtttattaatatatgggatttaaaaagatcaaatccgctcattactatacggccagtcactttacatgagttacaatacaatgggaaacatttccatatatcgcatcaatatggaacatctatcactaagatcagagtgattggaacaaaacacactacgtttatctcaatggatgattctggcatggttatattgtattatggacatcgttcgtttctgggtaattacgttcaaagcagaataattagtggtgattatgtgctgggaaacatagatgatattaataaagatcattctttggactttgaattgttaccaattggttcaaacgtagtaactgcagataaactatgtttatttgcgtatatcacgccgggttatctagttattgcttctactcgaccccaacttaaaacttttttgacgatagataataaagattttgatgaagatagaagttctgggttagttagttggtatcccgctatcaaaaatacacatggtaatcttgagttacctttacttgcttattgttggggtagtatcatttatcaagtgaaagttcattcagaagagcaaattgatgaatctggtgaaatgagctgcaatattcacgttgatgacgcaaagagtatcaatattgaacatccaataaattttttgaaatatttgaatcatgatatactacttgtgattacagactctgaaaacatgattttacttaattccaaaaatttaaaagttttatcctctgaaaatttaaatttgggtgaatcgtatggatatctccattccatacttaatactttaaaatcaaatgttttaatactggaaaaaaatcaattaattagtggaaaccttccaaactgggctgatatacttttatctttactctcaaatgggaaatacgtagaggctttagaagaatcaaaaagacaatttactggagatgaatacctgccactcatttctcttccttcggatgatggagagagacagaagctcttgggtgtttatttagtacaaatttttaaatcaactataaaatacatattcaatgattcagaaattgaaatatatggaatgaggaaaatagtaacattacttattgaaacttgtttgatggttaaagctccaattgatgtttatgacatgatatatgaaagactaatgagtattgattccgaagatatatttttcagtgtcttagagatttttatatttaattcccagctaacaacattctcaccttcgatcttaaaatcaatggttgaatattatagtaaagttgataatctagctattctagaacagttggtttgtttgctagatattgaacaacttgatatagactttactctttctctgtgcaaaaagtaccacttgaatgaaacttccacttacatctggacagcattgttacatgattatattactccatttatggactctattagcaaaataaaactcttggaaaatgacactctcaataaagaacaacagcgagtagtcaaaagtgatattaattatgtatatccattcatttcatacaccctcacaaatagacagtatcccactaataaacctttaatagacaatccatctgctaaactcaatatttactatctattattcaatggatctgcaataccttggccatctgatggtggagtcgtgcatacaaccaatgactggatgttagaaccaaccttcccgtatctttttgcattgttgaagtacgatagtcaaactatgtttagttgtctcaatgaagcctttgaagatgagttgttgaatgaattggagataaatacatttgcaaatgaatcatacaagctacaagtcaacaggcagtatataattgatattttattaagtatttatcatgatcaagatgcaagacttacaacgattgataaaataagaatggctattttcattggaagaaattatcccaaatacatacagttcatacgattggctgatagtacatctgaagaaatgattcaacttctctgtcttgtaggtacaattaacaacgatccagaagccagtgattctatggattttttagaatctatcgacgaagaaacattgcaggattgtcaactagcaattaggacattgttaactgtttataagcctattgatattgaatctataataatccaaattgagagagcagggtattatgaagttttgttatcactctatcaatcagagggacgattatttgatgtattaaaactttgggtaaaacttcaaaatgaaaatatcacaaattgtgagttatttaagcctatttgtgagatattagaggatactttggtggcctcagatagctttgataaaaaagaattactaaaattacttcgtgacaacttagaattatttgtaagaaatgatccgaaagcgatagcagaaattgttatggtatactctccggatctaaatgctgaagttattgatttcaaagattctagtttgaagtttgaatatttaaaagacttttttgacatcaaagagattaatacgaagattgaaaataaagaagtggagcaaacgttgaaacttgaatatctcagaggattaattaggaaaaggtatactattcaaaatctgatttttaataataacaaagaacttggtgttgaatacaaagaagaattggacaccaaattaaatgatttgaacctgaaaattcaatcatttatttttactctatcagaactggatgaatcaataatcagaatgcttgaagtggataattttgaagtattgattgattggtacttacatcatgatgattataagtctagcattgacaaaatatgtaagattatagaatctgtgacaaaagaaattgaagagaaagggcgtaataaggaattagaagacaaaatatggaaacttttagataaatcttttatgtcattatcttctacgaatttaaaattatcaaaaaatgaaggtgaatttactttgaaggagaagcttctgttgcaaattctagaaacatgcgtcaaaatgttaaataaggtaaatgtgaaacaaaatgatagtgataaagatacagaggtgtttgttttttacaccaaaattgtaagagcagcatttacaaatgtaattaatttaaatgttgaacaatcttcatcttcattcagtaagatttttaagaaatttttagatgggtcatctattcatgttactaccttaggtgatgttaatttaattttaaaggaaatttttaattcatatttagctgatgaaaagattctaaaactagtcaaaactctggttgatggagatatatttcaaaacttgaatattttagaggacttaaagaaaaaaggaaggtcacctaaaaatatcgaatgtgctacatgtggtaaaaatatttggggtagtaaagttggaaatgatgtttatgaagtttggagagatcgtttacttgaattaaaagatattgataatgaacaatttaatttcaaaaatagcattttcatattcaagtgtaaacatgcatttcatcgtaaatgtctagataatatgggtatgagtgaagatgcggacaagaaatgtgttatatgtgaaaacgtttagaatgtatattataaactttatagtacataagagttagttttataagaaatcatggaacataaatttaactaaaaggaaattgaaagaagtcgtctaataaatatttttgttaacattaataaaatgtaattgaatgaaaatcattgctttttagtttcatccatccaatcaagggtatatcttataccttcttccaattccacttttggtttatatcctaagatagttttagcctttgtgatattatggtatctataagcacaaacaatcttgactctaaatggagttaaaccgggttctttacctgataattttgagaaaaactcggataagtaacctacagcaattgcaacaggtctggataaaacaatattataattatcgacatggccatcagctttccaaacggtcctagccaaagtccagaaatatgaaggtgtatcattagtgataaagaaagtctcaccaccaacatctgatactgtttttggatcaagtaatttttgagctgctaaaacatgagaatctgcaacattaccagcataagtccaatcgaataaattattattatcaccgacttgaaacttagtttgacctctttctaagacttgtcttaaacctggtactaattgtctatcaccagggccaaaaataccggctggtcttaaagcgactgtgtaaaagttttctggtggagaattggcttttaaaaccatattttctgcaatagccttggtttcattataaccatccattggaacttcaggaattggccaagtttcatcagcattatgaacatcctcaccattaaaaatgacaccagcagatgaagtataaacaagagcacgaattttttgttccttggcacattctattaagtttttagtaccatgaatattaaccttttcataaatttcttgtcctagaccatgaattggagaagcagaatgaacaattacacttggatttgattccttaattgccttagtgacatcatctttagatgttaaatcaccaacatgaacctgaattttctttggatcaaatgtaaaatattttgaaatcttatcaggtaatggacgaatatcaaagacatgaatttcaggacgtggagattgttcccaaaattgttgaacaatatgaagacctaaaaacccagccccaccaatcaaaagtactgaatccatagaagtagccattttcaaatacaaaacctttcttgaactttacagaatatacatttttggatttacatccttctattaaatcaatcgattcatgcatcattatgaaatttcaaacattgctcgtataaatcgtatagatttaaagtatttggtcgatgggtcgaaatttctattgcctaattaggcaatgactcaatggcggttggcgcgcttaatttgtctataataatgagtaattcaatcggacaattatattccaacaaattgttcacttaaaattcaatgtgaataatttttttgttcatctactctttctttcttttttactcttgttttataaatttagtttttatataacaaacaagaaaaaaacatgagcaatcaaccagctgaattaaaattatggggtggccgtttcaccggtgcaactgatcctttaatgaatttatataatgcatctttaccttacgataagaaaatgtatgcacaagatttagaaggtactagagtttataccatgggtcttgaaaaacttggattaataacagcagaagaattaaaggaaattcatcgtggacttgcaatcatccatgaagaatggaaagaaaacaaatttgttgaaaaagatggtgatgaagatattcatactgcaaatgaaagaagacttggtgaaattattggtagaaatatttctggtaaagttcatactggtagatctagaaatgatcaagttgcaactgatatgagattatatgttcgtgatgaattaaaaaaattaaagggttatcttaaaacttttattgaaacaatgattaagagagctgaagaagaagtatcaatcttaatgccaggttacacacatttacaaagagcacaaccaatcagatggtctcattgggttagcatgtatgccacctattttactgaagattataaaagattagaacaaattattgaaagattaaattattcaccattaggttcaggtgcattagctggtcatccttacggaattgatcgtgaatttttggcacaagaactaggttttaatggtgttattggtaattcattaactgctgtctctgacagggattttgttgttgaaactatgttttggagttcattatttatgaatcatatctcaagattttctgaagatttaattatttattcaagtggagaatttggttttattaaattagctgatgcatattcaactggttcatcacttatgccacaaaagaaaaatcctgattcattagaattattacgtggtaaatcaggtcgtgttttcggtagtttagcgggttttatgatgtcattaaaatcaattccttcaacttataataaagatatgcaagaagataaagaaccattatttgattcaatgttaactgttgaacattctattttgattgcaactggtgtcatttcaactttacaaccaaataaagataaaatgtttgaagctttaagtatggatatgttagcaactgatttagctgattatttagttagaaaaggtgttccatttagagaaactcatcatatttcaggtgaatgtgttagagcagctgaagaaaacaaactatcaggtattgatcaattaactatggaacaattcaaatcaattgatgaacgttttgaaaatgatgtttttgaaacttttaattttgaacaatcagttgaaagaagagatgcaacaggtggtaccgctaaagttgctattttaaaacaattaaaggcattaaagactactcttgatcaataattgaaatttaatgtaaatttttataaactggtatataatgtaatgtatatctctgtgaaatagaaaaggaaaaaaagaaaaaaactgaaaaagcacctgaaaaagcatttaaactatagaaaagcattgtaaagtaaagtggtataaagcaaattaaaattaaaactgaactttgggtatattattgtatttagaaaatgtaaacttgtttgattaattaaaatgtaaatgttaaattttacttattcatctatcacattaagatttatatcgcatgaatttggtggtgagacaacataaacaacagatggtctacccatataaactttctgtgcaactccggtacttattgaagatgatgaagattttacgtctgctgtgttgttatcaaaatcatcaattagcattgaataagagcttgaactaagattatttctgtcctcctcttcgtcatcatcatctaatctttctttatcagtttcattatcttcatcggcatcataattattcccatttccgaactttacaggattaatatacatatcaatgagatcgttattagcttcaaacttgtttgggagaaagtttttatgtaagtaattactgtttgagtctattgacattgtattacttgaaattgacaaactccgacgatgtccgagatgtttaatagatgagactgaaactcgacgtattgatttatttgaaaaggatggattatgatgcatattgtaactagtattatgattattagggaatgagaactctgaaaatcccatggatttcctataaattggttttgatggagatttagtttcttgaaacatggaagaacatggacttattggacttggttgatcaaaatatggagcttcctttgcagcttttggtgaagggagagatcttggagaatcataattatgtgctgaaaagacagaatttctataactcgatggtgtgtgaggtgaaggaggatgattttgaatcagtgaagtacgaggcgataattcaatagatttcttagaagatgattccaaagaggaaggtaaactatcaatatcataggaatgctttggtttagcagggaacgtgaatgtgtttaaattgtagaatgtatcgctatcagtatgtgactcattcatgattatttcatatgagtttaagaaaaggtagtataagtaatataataataggatttggggacgtacaagtactaccccatgtatgtattaattttataattttaaattatcagtaaaaatttacattaagcagaaagtgcccggcatgaatcatcaatgcaaagaaaaggtaatacaattaattaccgataaatcatcacaggcagaaaacaaggccggtgtgcatcggaggaaaaattactagagtgactcggtgtgtaaagttcaggaataagcaagtttgaatatctgtcataaaatacaataaagtactcagaatggtgcacagcaaactattggtcatcatttaaatcacacaaaatcacaatattataaaaataaagttttaaaaacaagaattaaacaactagttacatctgtcctctgacagagatgctgctgattgcttgtccttggtaagaaaaactaaacgtcatgaaaaacatgctctgaaaaaatttttaaaaagtggacggtggtcaccttttatagttttaaatgcgcgagttgagccttctttggaaccccatttactattacagggtttcttaactctttattattataagttatatacacgttacttattgtctatttagttctttcagaagtatacgggctacctttggatcagagagatattgaatatgagatgctactccaaacatatccaaacttcctgttttcaaaacccaatctacccttcctgtaggatttagcatttgtacccttttcaatgctatagggtctttgatctcaggtggaactttacctgtagtaggttcaccctctgctggtttaacatcactccaatcgttatgaatgagtggctcaattctgtaaccaactggatccgtactgtagaaaatattatagatggagttgatagctggagttactgcatttttattcttatagttttcagttttcattaatggaagaatttgttcaccacgaataagtttgaaaataccattaggggatcctagagagaaaaaattattaacttcaaaatccaaaaccttcttgttgctttgtctatgaagaatatcaaggacaattgcacttccaagtgaatgaccaacaagtgaaactttacctttgaaatttggattatttgataggaatttcttatatatttcatttgcataatttgcaacacattgtaacatttgctcatgatatttaggttcatagtataataaaatatcaagaagaacatcagctgttacttttcttattggtgaatctgcatcaacacttaaacttgctaactttggcaatttactatccggtagtatgcggtcaaacttaatatcatgtctccaaattattggtagtacttgaactttacaattgttattatcgttgttttccttatcgtctttatctggattgttcaatataaattcctttttgatcaattgtctaaattgattacaatcatgtgcaaaattgatggatgcatatttggaactcagagcttgtccgataccatgtacacagagaactaaatgatcaatttctctatcataatcgttattataatctaaactattgtttgcaaaatcattttccataatactttgaaacattttattggtttcattcaataatgtagtataatcaaaatgaaccaactttgcatttttgatagagtctaagacattagtagagtcacctgtttcacttgagccctcagtttcatcaataggatcaccgaccttcttacttgcagattctttcttctcattttctttcttaactttcttcttcgtttgcttcttttcatctttttcatcctcttcttcatcaatatatcctcttttaacaacatatccaaatactgatttggatcctggtaaattgtcaattacaatttttggtacacctccttcattcaacagcactccttcatctttggattggaaatgtagtattttatctaaatcactcaaatcatcaaattgtgaataaggccaattaccatatttctcttgaaataattgtttttcactcttcaatctaatacttggtactttatcatgtaaatccggtctatatttcttaaaagcatcctcaatttgttcacctattaaatcaggtacaggattattgtcattaaaccaaattccacgacgtacctcataacctggtcctgtccaataaactggtgacattatctttttatgtaaatcaactgtaaacaatccatcttcattgacattaactggtttgctattatgatatgcattttcaattctatcggaatcaccggttgtaaatggtataaatttagttgctcttgcagttggattatacttaaatggttttgtaattggtatatctgttgcataaaaccatcgtggagttatatgtggtaatggtggtaccttcattatcaaatgttttattaattgtagaaagaaattagttaaggtgaaatattaaaaatttcaaacaacacatgaattaatattgcatgtaatggcatcttgtttacttttcatttggcgaatctttttccggatacatggatttaattgctaagtatgggccaggtgcaaagctgatgttgaaaatgggatacgtccctggaactggtcttgggaagggtggtacagggattgttgaaccaattatacctgaattaagaaaaaaaggtgaaggaattggggtgatgcgtgttattcaagaagatgatggttacagtgataacgaagatgaggatgaagaagaagagggtgataaaacagggaagttcaaggttaatgacaaaccattaggttttgaaaggaaaggtgaatatgtctctgattatgttgttgaaatggaattgtatgatatcataagaggattacaagaagttgttgatttagatggagatttattgaaaatattggaaaaaagtacagaagttgaaattaaaatgaaactttatgggattttaaaagaattaagattagatgcatcaaaggaaaaatatttgttatttgaaatagaacgtttgaatcaattaattgaaattgaggaaaaggatagaagtagtatacaaaggatgatagatacggtttcaaatgatgaagaatgggaagaactgttagaagttataaactcttcaagttcacgagtgaataaagacttaatccttttagctgggaaatatattgaaccaatatggtccgagagagtgaaagattgtgattttgatgatattgcagagttaggtagaattttggatgctgcatctgaatacttgaaagttaatattatagtaccagaatataaaagtataattcttgaaccaatatggaataaacttaagactttttacgaagaatgggaaccatattatgagcatgcaggtcttggggttttggaggagatcgacgaggcacatcttttcaagaaagatgatgttttaagagatattattgttccaaaattcttaaatgaaattaagactggatatggtgatgaacttcattggttagattcttggctatgggatgttagtgattataaagaagttatacgagatgcagttggtgaaaagattcttgaaatgatttttgaaaaaaattaccttaatgtcgactattttattgaaacatattcagatatgaaaacatggacaaatggaggtcttgatttagaaccttatgttatcaaatattgtaaaatagttagtgatattggcgaagacgatattttgagtaatgaaggtatagaacaatacaaagtgtttgtggaaacacttgaacaatttgatgtggaaggagatgttttttatgatgaagtgttttccaaatatttgaatgaatatgaacaatttaatctcgaattatatggattaactgaaatcatttcatttttagggcttatggaagaagaatacgttaaaataattacaaaagtcagagaactttgggagaacgatgggaaaacatttagtaaaggatccaaacctaacaatattggaactattaaagatattgtttttcaatggtgtgaggaacagggtaagagtataataccttatggtactttgaatggtaaggatatttacagtattgaaggtattcaagtttactttgaaggaaaagttatgtttaagcgtaatggtgatccaataggtttgaatgaattgtctatgtaattttaaatttataattttttattatatacagtaattgattaaaaattgattatttcttgttaaattcatcaattttattttgagcctttgaataaatatcataagctaattgtttaccttcaacagctgcttcttcaactgattcgataatatcattattcattgcaatagtatcattaacttgttcttcatctcttaattcttcagaatagaaatctgggtattttctaaaacattcttgcatacccttgaatttatcaatacattcgataccctttggttcttcctttgagtaaacgaaacatgaaaatgcagctttaaattcttcaccacatggaccatcagccattcctccaagacatggacaatcccaattaatttcaccagtttcttcattaaaagcagtgggtgcagattcttcagttgaagctggagctgcattggttgcatctgaagattctgaagattctgaagattctgaagcttgttgagtttcttgaggttcagaaatttccgccacttgctttacaggaagtaaagaatcatttcttaccttattcatcataacataatacatggaagcagaagagacggcacacgcagaaatggtggccatttgaactcttgatttagacagtctagtaagtgcagcaaacattgccaaaagaaaagagatacattagtaattaatgttaaaagaaggttcaagataatttttcataggaattagcgagattgcagtctttgcctagttaacttatagaaaagcagctattattaatttaatttatactataattatatgaactatacaatgacacaacaagagttagtcttttttgcttgcttatagaaagtcttagatgaagcagtaagtgcatctgatttatctacaagagcatctaaacgttcacctctttgtaagacattttcaattgattgctgcagcacaattttagtttcatcaagttctgcttgaactttcattaaagcatcagcttcatgaggtgattgatattttgtcagaagtgcatccatttcactttgagaaatttcactttgtgaagcccaatcatcacaaactttattaagtaatgtaaatgcaggtctaataggataagatttatcagtaatcataacagctgcaattccctgcgtacgataaacatgaccaacatatgcaccttcttcaacactttgacgaccatcttgtggagtacgtgttgcgattgtatctgcaaagaaagtaagaaattgaccaacacttgatctttggaaaaatgggaatgatgaagtatcgtgagaggatacgagttccttagaatgatcctcgtctggttgtaaaactcctaaataatagatttgcattgtcttttagatgctaataataacaaataataaagaaagatagattgatataaacaatatatcgtattaatcaatcaatcaatccctcaattgaaggaaaggacaacaaaacctccataagaaaatagtggcgcagtaaatgataaacgagaaaaagaaaattacggcgcagtacagtgcaattacgtaatacaaccaaagatattaacggggcaacttaaagtgcaatttcagtggtggctattcctttctataatggttggtaatgcattatatacactttttaccttgctttcagagtcaactgaacagggataatagttttcattgtgcttagtactagacagtactccatgttgtatgagacgttgaccttcttatgtttttattttaataacttaacaagaaaactaactgattatagcttcatttaaacacctctattctgaacagtctgaatatcagagagtgaatcctacaaatgtgttagttcattaattaaagaaactgataactccgaactatccaaagctaaatgaatctttacataatcttatgaccttcattactcaatacggactataacgttttaaaagacggagatataaaatcgtgaaaaaagttgaaaaacaataacattaatgtctgtttccgtggagataattaacttcaggacatctcttttcttatgtcaaaacagagtttttgttaattccatcaatggtcttggttgcttctataccccatgaataggatcttcgaactaatatgtcatcagatgcaaaaataaatccgtctatttccatctctaaaaacgttctccttatctctatgagtaaaatatttaagcttatataaaggaccatttgcatttgaatttttactttaagcttaattaaccttaaataaccttcttcttttatcaaaaaacaaagaaaacgataaataagaacaaaaaaatgtctacttcattcagagcaattggtgttattgattacaaggattggttaaatccaaaagaattctcatacgaaccacaagagttacgtgataatgatgttgaagttaagattgaagcatgtggtatttgtggttcagatattcatgcagcttgtggtgattttggtgaaccatatgctccaatagctgttggtcatgaaattgttggtaaagttactgcaagaggtccaaatgcaagattccaaattggtgatagagttggtgttggtgctcaatgtgatgcatgtaattcatgtaaacgttgtagaaatggtaatcaaaataattgtaaacatcaagtctatacttatggtgctatctataaagaaactggtaaacctgctcaaggtggttatgcatctcatgttcgtgttaattcacaatttgcattcaaaattcctgaatcaatggattcaaatgatgttgcaccattattatgtggtggtattacagcatttagaccaatgttaacttatggtgttaaaaagggtactaaagttggtattaatggtattggtggtattggtcatatggcaattttatttgctaaggcattaggtgcagaagttactgcaatttcacgtaatgataaaaagaaagaattagcagtatcattaggtgcagatcattacattgcaactgatgaagaaaactttgcaactaaatatgaagattcacttgatttattagttaatactgcatcatcatttagtgaaaccgcagttgattcagttttaaatttacttgcaccatatggtcaaatgattttcattactgcacctccaatgactgataccttaactctttctccatttcaaatgttattaaataatatttcagttggtggttcacttattggttcaccaaaagatattgaatatatgttagaagttgctgcaaagaataacattaaaccgatgattgaaactatagatattagtgaagcaaatgttaaaactgcttgggaaagaatggttaagggtgatgttaaatttagatttgtcttgactggttatgacaaatattttggtaattaatgggcgagttagtttctaaaattatatttaactagatttttatactatcctatatagaataaacaatacatttaaatcaatttatctggtcgtttatccagtatattttggcttttaatcttattttgctttatttatcagcaaattaacatgcacttttcaaatttatatccttagcataatttgtcttaaaaatttatgacatttgtcaagtagaattaaacaagtcaatgaagcaatacaacttaaccaactactttcatcacacagtaatctctatacacctctccatacaactctatcaatgatacctttgctattatcaattgatactaatcctaatccatctaactcccaaacacttcttactaaccatgcagcctctactttattagtaactcccatcgcttgtgcaagatctccaactgaaaccctactacctccagattcctgtatacttctccatacttcacacgtaaatgtaccttcttctaacatactcaatacattctccctcattgatggattatctccttcaacactctcatcaaatgccttctctccaacaacacatacctctcgaaacatttgtccttctaaatctaacattataactttttctgaaattgtcttttcagcatgttccgccatatcagttatactaacactttcttcagtgtatcctttcatcatatcatcatccattatacttttaattatttcgacatccatattggatcctaatactctccacattttctcaagtattctactaatacctcttagcattttacgtttaattaccttttcattacctccctccttctttatttgataatatttcccaaatatcatttcaaataattctaaattattctcccatattttcttctcatccttcataatcatagcttgtaaaaaattaagaaaatcaatcaatcctctcaattcatatctccaattaataagtctattcaaattatatctcaacatctcgccaataatcttattctcttcagttccaccttcactaaaggctaattctttcaaatatctcccattttcttcatcatcgcccttattcatcataacagatggtaatgtcttaaatatttcaaaataaattttccttaattcaatcttactgaaatctttagtccaaaatatacttaaaggttgactaaaataatgtctcatatagatcatctttatcattttcttgaatttatctatgctcatatcctctttcattttcaaaaattttagaactagtctaggttcaaaaattaatgaattatatgtttcattaatatttaataataaatcttccataatctgtccaatagcttccttagaattatcaattgaaaatgtacaactctttaatttaccaatcactaaaacactgattttctcttcaaacataataaatggtgtactaatacatatcagacaataaacttctccacataaattatattcatacatcatattcaacacactttcaattaactctttactcatactatcaccattctctatcataacaactagtctaattttcatacgtttgaattccttaagcatatcaattatatctataaatttacccttaacaacattataaataggttcaacaatgttcatttcaatctctccatcatcattatcaacatcaccttctaaatcttttaacttccttttcctcctactattattctttttaccttttctatttccatttcctctttgacgtatttcataaaccatagcttcctctattcttcttacaattctctgtatattgaaatcaacaccaggattaactctaatcaaacaaatatcatcctcctctcttaaatatctacaaacattaactaacaatctttcatggtttgatatatttgaacctaaatttaaaataccactaattaatctctcatcaaattgtctatccttgtatcttaaaaattctcttaaactacgaaacttaaatctatcggttttcaacaaaacattgttaatactactcatttgttttcgccaattttgctgaaataattcatatcgtagattaacatttccatcaggttctttaccatttaataatttcataaaatctccataggaattgggtaaatatttactctcaaatccttcgtctattggtaatattctctcatctcttgcctttaattcataaattggtctctgtgactctataaaatccattactcaataagaagactgtgcagattagacgcagatcaacaacatgaatgtaatgcatggattcggttgaaaaaaaattcagtgtgcattttaaatttctataattccattcacttcttctttcttttcatcactaaactatctaacaaatgcctccactaccaatcgttcatataaaaaatctgccgatacaacataataaagagcagttgattgaacttttatcacaatttggtgaaattcatcagttaagactatcaaatacacctcaaactcaaggtcaactatttgtaatttatacaactttaaaggctgcaaatttagcagttgataaattatccggttataattataataatcgttatttagtcgttaaattatacaatcctcctaaacatttattaaattaatttattgaattaacttgttccattaaagttaatacactacctaatgtatcagtgaatctactggtttgtctatgttttgaactaacacagaaacttattctattatctttgataatataaccaataccaaaaccattttcactaacaggtccaaatccaaatatttttaatgatggattaccacaattacttgttgaaattatagttgtatttaattttttccatccttcatctttgaaaattaatggaatttcttcatcatttgcatcactttgtttattaacaatcaaatcttcctcttcactgctataatcactttcactattattattttgacaaaaatatttttcccaaatacaatatagtgcatataaatgacgatcttgtcctaaaccatttgagcattcagctgtacgcctactatgttctttacatgcatttttcaataatttaattttttcttcattactaatatcatcattaaagaaatttttaactaataaacaagattcatcactgacacttctaattgcttcagttctaccatgtaagaatttttttgtcattgcaggttcatatgtacattcaattttaccgtataatttataataagttaattggaaactcatttgaataaatgcatctggtgacatacccatttttttaattctttccataccatatttattaaacattaaagttgaaaattcattttgactaattagatcacttaatcttgtttcagcaaatcttaatgataaacttaattcatttgttaaattccattctaattttcttggaggtgaatttgttaaattatctgaatttgaatttgatcttcttgattttttaggtaattcatcttcaaataaacttggggaatctttatttatagttttagcaaatcttaaaattgaatctgtataaatatcacttgcaaatcttaaaactgtatgaccatcaatacctgtatgttcaaaatttatacctgatttaccatctttggtaacaattaattgcagtttatcataccaacgattagtacaagtaccaatttgaacaccatttttgataatgcttttaccacaaaggaaattttgtgaaattttatttgcatcttgaccaacttctaaattatctaaaactaaacaaaataatgaagaatcaataattttcaaaatttctttattaattgaatcactatttaatatgtttcttaaatttgaccaaactttcctattttcagttgttaaaacaccaaaacttgatttagcgatattaatacttgaagaatcattgctattatcatcatcattatctttattataaaattcggttgaatcatttataattgatttaagattagttttaatttcatcctctgttaataataaattgttatcatcatccaggacattaaaccagtaaaattgagaattgacgacaacaactatatgtttactattttcataagttttcaaaacacaaccattgttagttggaattctacaacttccaaataattttaaatattgatccatatctaaaggtttatcgcctttgattttatcaactggtaaagttttatttcttaaagcttttataaatcttaaagttgaattagttaattgacaaccccgattaatccaattacattcaccgggaattggatcatcttcaatcataataaaagggttcaaatttaaaacaacaggagaatcataattaagatatgaatcaaaccaaaattgttcaatataagaatctttagtttttgaatattcaattaataaattttgtaattttggaccaattgattttgcaaatgaattacaagatttaacagtttcctgatatttctcctcagattctaaaggtttaataacttttaaataacgttgtaaagtatcctgtaatggaggtattggtaatttttctaattgattttgatattgaaatgttgtcattttgttttgataagtgaaaaatggaaataatataacaaccaattaacaatcaatgattaataacaataatgatggttataggtagtattcattgccctttttataacacttgccactgataaccatcaaatagaaataaagggaaatagaatgtacaaaagatgaacaggtctttcaacccccgcaaagaaatcggattatcggatagtaaagtcatctcggaccctgggcaatctccgccgtttttcttaattatgataatgctctctaaggctcgcttactcacttacttactgtggtgagaaaaataattatcagcgatatccttttgatgtggcggtgcagtcggtgcagtggttaattgccaatattgatggtggtggggtggctggtgatgtggcgtgtgaggtaactgctgaaattgttgtgggatcagtggcggtgcagtattagaatttgcattgaaattggaattggaattggaaaatgcagtacttaatagtggaggctcagtctccattttattatgatcatgttgctgtatcctagcattattgtcttttttaaacttaagaaaggacagtgatgatagtgtttgttgtctgagtagttggtgtgttcttgtcagtccaagtttacgtcctaatatattgggaaaggtatccttttctcgttgttgctgttccttctcaagagcaacttctttttcttgctctaattcatcaatttctcgtataatctcggcggtttcgttagcttccatatattcatcatcatcagatccattattaaatgtctctctagttgtcaattctgtcatattctcttgtaataatactcgattcactcaatcggtcacttatacaagtaaaagaagtggaatttgtagtggaaaattattaacagtgggagaaaaaataaaaatcagcgaattttccgaccctatagaaatccattgggaaatagaaatagagtttagtttagtttacttttaaaaataattattatagtgtaattaagttgactgttttaaactaaagtcaacaatactttaaacaatatgaaggataccccaaattttggatcaatacgaacaagtcgaaatccatttcgacgctttatacgaaataatacaaaacaaaatcaacaacagcaaccgcaacagcaacaacaatcacatgaaacactgttttcactggatgaatctgaaatggcaatttataataattcaaaggagttgaatataacatcatcaattcattcagttattaaactacaagactcttcttcaagtctaatatcgagaggtaaatttgaaatttatacaattaattcatcattaaattattttaaatgtggttcattaattcatccaattttacaaaattgtaaatttattaaaattaatataaatacttttattataccattgaaaaatccaatacgatattggaaattatcattaaatactgaaagtttaagtactattgataaatttcaatcaattattgattcaattgcaatcttagaaattaatttaattgataattataatgttcaatcaccatttaattcttttgctgaaattgagctacatcatccaactcccgtacggccaaattcttcttcaaatacttcaaataattcttcaatattacaaaaatatacaacctcaccaattacttcattatttaatgataaggaaataaattcagatatagaccccgatcttgatgatgatttgaaccttgtgggactatctatagactcaaactccgatattgatattgatgttgatttaaattccgaacttaatgttgaaattaattttgatcaagaaattgatcctgatctagatgcagatttaactttacatgatatgtcaaaagttctcatagattcagatgatgatgattcaatatctgaattatttctaataaacaataacaacaatgacaacttcaataataataacaataataacgaaaataccctaactaatagatactcattatcttttaaatcttatgatttaaaacgtccaatatcaatgaatgtactggatagatataaatcagatctttctttaatgataaaaaacaaagaataatcatgcttttcataaaaacgaaaaaaaattatgctacaaaagctgtgctggctactgctttttacttttataaacactgtatactaatactaatactacctactaattatcaatcatatgagttctctcaattaaaaaaaaatattaagagtttgttcttatcataattctccaatgaataacagaaacaaaaaaaataaacattatacaaacattttcaactatgctctaggcgagattcgaactcgcgatcttcagattatgagactgacgccttaaccagctgggccaccaaagctgaaatttattaatataatgtgttccctccggccgggatcgaaccagcgacctcaagatgtcttgtatgctgtttaagcctattacagtctcgcgctcttccaactgagctacagaggggttgttatgctccaagtcgaatgtggtaaaaaataaaatctaatttttcaataaaaaattttttgtttatgtagtatctcatgagccattagttaaaacgatttgaaattttttacggaggctcaaatatgcttgaaaaatatctttatttaaaaattaaagtttaaatgccaaaaaaaatttgatgttttttagttcaaattgaagaattttcacttttctgattttattttaatttattaaaactatcaccggtatatttattcaaaggtacaagggtaaaaaaaattaaggctttttaatgtgagacaaattttatttgccctagtagtttttatatgctcagaaattatataatatcaatgttttcatagctaaaactctgtaatcaactgatacttttattttattataaattttttttattcattacttgttttttcaattcattcatatatttagttaatacttgctgtttatcatttttttactatttacaattctcattgattttttttggaaaagtatgagttttctctctcttgagggctttcttggttgttttaaatcacagaatacattatctatttgtttgtttattttaaagatccatttattcttctagcctttgatgcatcttttacgtgcatggaagcgtttggaatcacggaaaaggcagaaaatttagaactgaaaaaaaatctcatagtaaagagaggtctctgtactgttgtgaccttttcaaatcaattaattatgcatgttgtacatattaccatacttaagcagctattctgtgaattgaaatagggtgatttggcagaaaaattacccagaattacagaagacatgacaaaaagaatgatcaattacccgaataggcaacttttttctacttgttcagtgagcgaagcctatattttacaaaataactcatttttactaacaaattcaaaccaatttttcaaagatcaattattaaagcttttgttagtacaaaaatactataaaaggagccatgttctttacttttattgcaattaatcgtttgactttcttcttttaccagttagagtttactccactgttatattagcgtttacagtttttgcttttgcttttgcttttgcttttttgaactaagttttagtttactatttattttcatttgcttgaattttttttgttatactcccaaaatgtctttcaatatttctgattatattattgatgatacatcaattgaatttttatttgaaccttcaacacctcaatataccacattcactccaattattgaatccaacaaccttttattaccagaagtttcttcaaacaataatttaatcaacgatgagtcagaatttcacgatgtgctttatgatctggaagcaaatccagaagaaaatagtactactgatttagccgttgaaactacagctgaaactgaaactgctccagaagcagttgttggagaagatactactacagatccagttttatatgtttttagttcaagtggaacagatgagtttattgtgtttaacccatcagatgatatctcaaatgaccagtgtgatactttttcaacagatatgaatgatgttgatactaacgaaccaacctcgttttttaatgttcaccaatttgatcaaacacaacaagatactgttaactttttatttggttcacaagttgaagaaccagctgttgttgaagaagataatgtcattgagttagcagctacccctgagtttgaaaactatttgaataattccgatcaagaacttcacagaactatggctgatattaatgagagcaatcaattcattggcaacattgaagaaatcaataactcagaaccatcatctgaaatttctgatactactgttgatccaagtgctttagtcactacggttaatttttctgatcttacagccactacaaatactgctacacaaacagaaacacctgcttctttttttgctagtgttattggtgaaaatccagaatttttagctcaatttgcaaagaatttaaaacctacaaaaacatcagccaaaagaattatgccaatttttactcaactttcatttgctagagcagatagttactggaaaattattggtagaaacccacaatttcaatttgcagttagtaaagaagaaaaagttctgaaatatcttaatggtatcactattgataaatcattattacacagaaaagttgttgcttcattactgccaaattatcttaccgttaaagaatttgcaaaatacgaagatgttgatggttggatttatgaacaaggtgaacaacgtgaacctgatgatcaaatttcactgagatggtgtggtcaaaagcaaaacttttatcaaacttttgttttcagatatagagtgaatgaacttggtaccaagattgataaacaaaatttatgtccttattgtccgtatactgatggtatggatttgaattgtattttccatacagttgcagattcatcatatatgcatcatgtttgtaaagatcatggtgtttatactacaggtaatgaaatgtcaattccaattttcggtaaaacttcaaaaggttatgttgcagtttgtactcaatgtgttactccaattcgtcttagtgttgatattaaggcaaataatctgaataattgtctgatttcttattttagacattgtttcattaaacataaaaataagagacaaaatagagatagtggtgatgctcaaaaagaagcaaaggagtttaagaaacacaaatataatttattaatggaaactgcatagatttttcagaatgttttatattattgggtttaggttttggggttggtttttgtgtgttttcgtttttgtttatgtttgatcgttttaataactttaacttttgattttgatttttgttttgtattttccaagcttgtaatatttatagtttttaaaaaaaagcattaaaaagaagcatcctgctatgtagtaatttgttttaatgataagtttttaacttgaaacttaagcatacataaatgaaggttgaatatatataagtgatatgtatacaacttatattacaaagatattatacaagtagatatacaccggagaatatatagaaagtaagctatcacttcttcaactaccaaataatagaaagtcgatcgtccttattagattactgttattatagattaagagtcaaagagcaattattagaaactctttgattgaaattagccagatagttatacacaagtttaaaaaatactaaaacaataagtttaaaacaatatcaagaaagaaaaaagatgggtacaccagatcatttgatattagaagaagaattatttgatgatgttagagaggttgaaagaatcattggtgagtcggttaatcctccttttcctaaacctgaagttttatcagataaggatgttgatgttgatgactccaaagatcaagaagctggaagtggtatgaatacgctcacagttgatactatttgtggtattgataaaatcagaacaaatctaacccaagctgttgttgatggaaagaatgattggttaattgatgcttataaacatctgaaggaccagattgaaaaagcggatacatttttccaacgtgaaagtggcaaagagtatgaacgatttatgtgaaaggtaaatccaattatgctaagtggattaaagctgctgaaacaaaggttttagaattcgctggtattagggcattcaataggtattatgatgcactattcaagaaaagttcttatgaaatgtttggtgaggaaaggatgaagtatgatgaaattgatgtggatagagacctagttcctgttaaagccagagttaaattcgctaagttggttgatgcaattgcttgtgagtgctggaattacactgatatcttcgaggtattcgacatgtttgatgtcttgggagaaaatggaaaattaatggaactactcgccaaacaattaagggtagacaccgttgaaaaaaaagatgtctatccaagtttaagaatcttcttagcctataatgctttttgaactctttattcctaattgaaatgccttatatcattcttatatcatttccatattgataaatttccaaactgataatgatctgtagatgaggagtatccatttcttgtatctaatgtgtaacgtgaagcagtgcggataagagaatagacgactctagagtgtaaagtaacccattccaaccgctaacaacttgccaaaagcaaggaaacaaaagaaagtaaaaaaaaaagatgtaataccaattggagagaacaagtgtagtaaaaacagcaaaatacctctccttttatattcctcactataagtcctgcgttattttttttcaatttttattattggcttaattacacttagttaagaacaatggacaacacagttgagagatcaacatcagcaccaccatctgctgccaatggtaaagtatctgagttgaatttacaatctgaaagtaaatcaaaatccaaatccaagtctaaatctaaatcattatcaaaatctcccaatagtaatttacctgtgcccaattctcacattacaaacaatattgatcaagtactcgagaatgacgatttaatggacattgatgatgatgatgatgatgatggaaacaaggaagagactaaatctaaggaggataagaagatactcaatgagagaatacgagatgagaaattagaagaaatggataaacaaataaatgaaatgtctaatataaatttagaaatagtaccattattacttgatattattgaacagattaaagttggtgatttaccagttaaggatgccgataatgcatgtggtagaatacggttaagacttaataaattacaagagatacgtaatcaagtggaaaatggactttccagtatgaaaagttcattcccagacacggataagttacaagtggacattgaagtgaaggagagttgtttaaacagtatcagcagtcaaataagagaccatcttacccagtaaaacagctaagttaaacacacagtatataaaaacccgtacacagtaaaattactaataaaatttgaaattttctcccattctcgacgaggagttgttccttcccttagagtggaaaattcttgattgattggtttaatcattaagactcttcctataagacatacaaccatggctgcatctaatgttaatatcggtgatatgaaatcattatcccctcttcagggtgtttatcctattgctactgctgcagaaccaggattttggtcaactaatcctgtctctcaatttctttcatcagtatctcaaacaatctctcaacatagacaatcattagatttagttaatccaggtattatggaaaatattaataaagaagtctctaaagatgttttcttaagtctttatcaatttactggtttaaaggctgatattaataaaacttttgcaatgaatccagttttccaaattgctcatagttttgcagttggtagtaaattacctgcttattcatttacttcaattattgctaatgatcaagctttagttcaaggtactattgataatgaattttcattaactggtagattaaattattcttgggataaacatattacttctaaaatttctttacaattagctcaaggtcaaccttcaatgtgtcaattagaacatgaatatcaagcaaatgatttctcaattcaattaaaagctcttaatccagattttactggtcctaaatataatggtttattaattggttctattttacaatcaattacttctaaattatcaattggtatggaaactgtttataatgcaatggatccaaatggtccagctcaagctgcaatttctttagcaggtagatataattcaggtgattggattgcttctgctcaattacaagctcaaggtgctttcattggttcattctggagaaaagttgctccaaatcttgaagcaggtttagaaactacaattcaaattgctcaacaacctgttatgtctgaacaaatgatgatgccaactattcaaactaccgttgaagcaaatactgttttaggtgctaaatatgaatttagacaagctatttacagaggtcaattagaatcaaatggtgatgtatctttcatgcttgaacatagaattttaccaactattggtttagttttcaatggttcaattaatcaattcaaaaatacttctaaattaggttgtggtattcaacttgaaactgctggtaatgaagaaattatgatgatgcaaaatggtatggttgatcaaaatggtaatccaattgctggtgctcctcaaatgtaatttaaataaaatttattattacaattactaacctttattaccaaactaaaatatattaatatatattgtgtgtaaaatatatatattattaattatgtaaatagtctctcatgatacttaatttaaactcagataactacagttctatatataacattcattcagtaaatcagcccttcttataatgtgcgggtctttaaaaaaacacaacacagcatgaaattttcaaaacctccaattttgtcatcaacattgcatacattttatatcattttgatactataaacaacgaaatcaaggcacaatctggattattgtgtcaaataatcatataatattataagatgccagataagtcggatccaccaacacagacgataccgcttaaaaatattcctgatgagattttagaaactctgctaaaatctaaacttgaaagggcagtaggtccattggattatagttcaataaagagttgttcagatattgataatatcttgagcaacaaacgtccattagaggaagaaattacaaacactgaacccttatcagagaaagaattgagagagaaatatgttaatgaagaattgatgaagtacggcgtaccagatccaacatcagttatcacttcaacttcaacaactaatgaacaaccaatgtcaaatattcttgaactttccgtattggaaacaatgaatgcaagtatacgaaataacttatctccagaaaaggaagatttcactataactaatgattcattagaattattgactgattttacaagtcaattcattagactcatttctcaaagactgaaaagactgacagagatacagagaaggaaaatcccaaataaggatgattttaatttattattaagagaaggttattttaatttaactggattgaatgaaatgtatgaattatccagatctccaattattaataaagagaatatacaaaatatacagaagaaagcattactatcattatctgcatataatggaactgatgatggaggatttaatccttcaaatgatgattatgatggtgttaaaacacaggaaacttggtggattgatcaatttattcgaaggaagaaacgtaaaatatatattccagattggatgccaccattaccacctgattatacatttaaatcaacacctaaatataataatagaataactaacccaactgttttgagggaaaaatcagttaatgagggtagacttggagagaaagctttaaatcatataatgagcagagaggataaatctattaaaatcgaattttctgatagtagtaattctgataatgatgatgatattgatatgaatagtgatgaagaagaaaattatggtgaaactaaagagaagaaagatgagaaagaagaaaaggttgaagaaagtaaagttgaagacaatgaaaagaaacaacctccatctgaaattgaagaaactacttctgctgctgaacttagtgcacctactaactctgagaataaatttgatcttgtggagttagctaaacaaagaaccaaattattggataagagaagaaaagaggaagaggaaagaatacgtaagagagttgaatctgatgaaagtcactttggtaaaatatttggattttactctaatcttaaaaaattacctgatgatattaataaagaattaaatgattatcgtgataagaaattacattctttggttaagaatttacagaagcaagaaaaacttcatgctaaatggttattagaacaagaggagaaacgtaagaaagttgcagctgagaaaagtgaatatactgaagctaatgaaattcaaattggaatgggtagtggtaatgataataacaatgataatatttttgggaatattgatgaagaagtggaatttgatgttgaattcagcgatatggaagatttccaagattcaaatgtcggagaagaagagaataaaaatgaaactaaaggattaagtgttagatttgaggatgatgtttttgcaactacggatgatagaattctcagtgaggagactaatttagttgacaatactacaacagttaatgatgtatctgctaatgaactaagtgaaactcctattgaaaatatagagaattcaaatgtcccaatgattacggatacaaatgatacaaatgatgcaaaggatttgaatgatgcagatagagaaaccgaaccattcagaaaagttgcagaaaaacgtccacatagtgggattgatgaatcattagacgtagcagagacaaatgcgttacaaacaatggattctgaagaacctaaaattcaaaatgagaagatacgagtaggaacagttgtggaaatagtgggagaagatgtagctgttgaaactgctggagaagttgctgaggaaatggttgaagagatggatgaagaagatattgatatggacatgtttggagattagtgtataataagtagtagatgtatgaaattcttttgtgtaatacttataactttagaaatatagaataataagcatctacaagcacactatcgatatagtaattgcataccttaaacatgtccgttatatgtctcaaaagtgtcaataaaacaaacaaggtttatgggctccatgaaatttgatgagaacgttttttggtaaaaattgtttaagttgttttttaattctaaattttatctttatctttatctttatctttgattctttatcagttgtcatcatctgcaatgtcgaacaatgatggtgatataacgactgcctttttaccaaagaatttattatacccaattactgttttaaagatacatgtaaaggaagaacagacagtacagaaacataccacaattttaacgtacaaatattatgattatgaaccaattccaatcagtgaaattgacgatgaacatccagatgagagtgaaagacaagttaaaaaagttgaaaatgttggaacttatgaatctgggtttgatggtacgattcgtaaaatttacactaaagtaggggatgaaattactgataacagtaagcctatatttgatataattgaatcgtgttctcatccaatacaatatggaggactatgtgcagtttgtggtaaatctatagaagaagaggaaatgaataaacgtacacctatatcaatggctcatggatcaacagatttaaaagtttcttcaaaggaagctgaaaaaattgaacgttcttcaactgatcgtttattgaatgagaagaaactctcattagttgtagatttagatcaaacagttattcatgttaccgttgatccaactgttgatgaatggatgtctgatcctaataatccaaattataatgctgttaaagatgttaaatcatttattcttgaagaaccacctttcattccttttggttataatggacctccaattccaccaactaagagatggtattatgttaaattaagaccaggactagcagagtttttaagtaaaatgaatgaaagatatgaaatgcatatttatacaatggcaacacgtcaatatgctgaagaaattgccaaaattattgatcctgatagaatttattttggtgatagaattttatcaagagatgaaagtggttcattaactcaaaaatctttgaaaagattgtttcctgttgacacatcaatggttgttgttatcgatgatagaggtgatgtttggaactggtcacctaatttaattaaagttgttccatatgatttctttttaggtattggagatattaattcaagttttttacctcgtcaacaatcattacttggtccttctaagagacgaaagtctgttaataaactagaggaaacaattataaattcagaagagaaaaaaacattacatgaacaaagcttaaaaagtaattcagaagaagctatagcagaggaggatgaagatgaagatgaagatgaagatgagaaagctgacgttgaggacaataagcatagtagtattacagaggaaaataatcttattgagcctaccataaatgaaacatcatcatctcctgttgaaagattaattgaattaaataatggagaagataacaatactcttttagcggttcaagaaactgagagaaccaacaccttagagcaacaagaacatgatagacctttggctaagttacaacaaaatttagagaagatcatagaacaagaagaagttgatattgtaactgaaaagaaattatctaataatggtaaaaagtctgattcagaaggtaaattagaaaaggaaacacataatttattatatgatgatgatagagaattggaatatttaggccaagctttagttagaattcataatgaatattactttgaaattgaacaaaatgaaaaagaacataagaaatcaaaccctgatgttaaagatataatgattgaaatgaaatcaatagtattccaaaactgtgtgtttttattaagtagtgttttaccacttggtactaaaattcaaaacgctgatatcgtcatttgggctaaatcatttggtgcaagatttgtggagaattatacacctgaagtaactcatgttatatgcaaaaatccaggtacatttaaagtacgattagctaaaagtgttgatgcaaatgttaaagttgttaacccagattgggtatttgcatgtatgtcattatgggatagaatttcggagggaccttatacacttgaagttgaacatttattgagtaaatctcaagtacaagagtttatgaattctattaaaccaagtaattcaggtgtgattgattggggagagattgatgatgaaatgaaagagtttatgggatcagattacgaagatgatgaagatgatgacgatgaagaggataatatagagggtggaaatgcaaatggatcattaaaacatgatagagaagatactgataatgaagaagaagccaataagaagcagaaaactgtcaccaaagaagacgatgcagattcagaatctgattcctttgatgaatttgaaagagatcttctggatcatttggcagatttggaataaaggtaactctcacctataaaatagaaatgtttaccctaaatgaatgatctattagtatatagttttgtaatataaatataatgtaaaagataatattaaatcaataagcaatagaaatagaaatagaaatagaaatagaaaatgattacataatacaccggatataaacaagtaacctttaaacggagttaacactatttaggaagcgaagaggaaaaaaacctggcgctctctctcaatggaatttgttgtttttgttagtggagcatgtttatattattttggctgtttgatttaaaggatcgtttttaagttttctcttttgaaatagtatcgataagccatgcctacatcattaattgacaataaagaatcttccaattttcttgttggacttgcttataaggccaatgatatttggtatgatttagttgaaattttgatgcaattaccaggtggtgaactgatcatcaattatataaaggcatctcataagaatgatccttggagaactttattagaagctttattagcattatttgctataaaatattttcttgcatcaagatattcacaagatgataaagataatatggttttatccaaaaaggaaactgatgaattgattgaagattgggtaccagaaccagttgtcgttgatcttagggaagatgaaaaatggcaaattgaaactaatcctataattaacggcgctgtttctaaaagagttgatattcaacaaggtgatttaattagtactaatgttcttaattttgcttcattagatttccttggtatgagtactgataagaaagtagtggaaaactcagttgaatgtataagagaagtcggtgttggtgcatgtggtcctccaaatttttatggtactcaaagtgttcatgtcagatgtagagaagatcttgcaatgttcttaggtgcagaagactgtattatgtatggtcaagattttgcaactccaatatcagttttaccatgttttttgaaaagaggtgatatagtgattgttgatggtggtgcatatgttggattacaaaaagctgcaatgatttcaagatgtaatatagagtggtttaatcataatgatttagatgatttagaatcaattttggaaaatttatcaaaagatttagaacaaggtccacttaatagaagatttattgtcactgaaggtttatcagaaaattttggtgattcaccagatttgaaaagattagttgaaatcaaaaataaatataaattcagattaattttagatgaatcaaattccataggtactcttggtgataatggtagaggtttacctgaagtttataatatcccaagaagtgaaatagagattactattggtagtatggctcgttcttttggttcaagtggtggtttttgtgctggtgataaagatatgatatatcatcaaattttaacttctaatgcatatgttttctctgctgcattaccaccttattgtgcagttgcagtttcaactattataaaggcaattattgatgaagaagttgaaggtaaagttaaccctcatatcagacctctgaaggaaaatagtgcgtatttacattctcttttcaacaactcaaaggaattatcaaaatatgttactgttaaatctgatagctattcaccttcattacatttaagaattgatgcagatttacgtgaggctttagatttacctgatgtttatggtggtccaggttctgctgttacaaaagctttaaaaaatggtaatgaagagcttttctttgatcaatattataacttggagtctttcaaacttcaaactattatcaataagtgtgttgaagcaaaagttttaccaaccagaactaaaagaatattacatcatgaagtacttcctattgttccagaactgattctccatatcaatgctactcatactaaacaagatcttgactacgcatactctgtagtttccaaagctatcattgacactcttgaacattggagaaaaactggtaactaaattatttattaactttcttcctttaattattttaattctttaaaaattgtatagatttaatcttctgactgaagtaaaaactttttctgttgaatcatttatcgtactgcttgaaacaatgattgaaaaaaaaacaagttttacaataaataaaaaaaactatattattaaacacttctaaatacaaatttatggaataaaataactaatataataattaatgaactatataactaactaaattgaatgatgattatttcttatttttaccagtaatttttgatacaagagaagtaattagttttttaggagacattctttgaattctgaaagtataataaccacctaacattaaaaataaattaaaacaaatatatgcacagaagaaaccaatatttctccatctatcatcataatgaattccaacactattcaaaaactcatcacctactgaatattgacaaactgcacaattacttgtaccatttggattattaacataaccagtattatcatcaaaataactatctaaatattcaccacatgttaatccacttggaggttctaaataattatattcagtttcactacaagcaacttttctatcatgtaatgtaacacctaattgattaccaataaaatatgttaatggtgataatctccacatgaatttccaaaaaccaggcatcaatgttggtctttgaataacaccacaaaaactaatacaaaaactgaaaagtaaacctaataaaatattagcacttggcaaatcaggagcagcatataaaaccattaaggcaaatgagggataaaataattggaaaaagaaacagtaagtaaaccaccagaaaccagcataaggagcagaataatcagcttgaattgggaaataccaacaaataaaataaattgtagagaatacaattgaataaggaatttcattaagatattgagacaataataaacaagaccaatggaatgtatttgatttactttcacgaacttcaaataattctcttgatgtaattgcttgagtttgaatttgattcatcaaaggtgcactaacaataatagataagaaattagcaaacataacattttgcataccaatgactgtgtgctttgcatcccaaaatgaaaaaccaattaataaacctgaaagtaatgttaatgagaactttggcataatataaggtaatgatctataattttgaacaaacgttctatttaaaacttcatataactgataactataaggtgtagcatattttgtttcaagttcttcatctgtcatatcatcacgacttactagtgcacctaattcaagaagttcatcaatttctcttgatactttaatatattcatcactattttgccaaatatcaaaccaatcttgattgactgaagcagttgcaccagcaccaataacttctaaaatatattcagcaggattttcacttttatcacaaactctaccaccatgactttcaaaataatcaatgacagttcttgaatcagtaccaatatcaccaaaataaacagtttgaccacctttctttaataataataatctatcgaattgttcaaataatgttgcagaaggttgatgaattgtacataaaattgcttgacctgctttagctaaatcttttaacacttgaacaattgcccatgaagattgagaatctaaacccgaagttggttcatctaagaataataataatgaaggtttagcaactaattctgtagcaattgataatttctttctttgttcaacattcaaaccataaccagaactaccggcaattgaatctgcataatcttccatattcaaaattttcatgaccatatcaacatattcaactttctcttcatcaggaacacttcttggtcttcttaatctagcactaaataacaacgattccttaactgtaagttcagcaatatgaatatcttgttgttgaacataaccagttcttctttcaaatgaatttcccatttctttaccattaataagcatattaccagtaataacaccaacatcagtacgtctagataaaacatttaataaagtagttttaccagcaccagattcgcccattaaagctgttaaagtaccaggtttaacataaccttgaacatcgtctaataattttctatcagcaccatcataaggaacaacataattaacattcctccaagtgaaaatatcttcagaacctaacttgtggttatcagagtcagagctgtttatagattctgcagtagcactaatatcatcttcatgtttttctaaatcaacttcaattgcagcactatcatcagatgcaattaaacggaaattatcaaacatttttttagtaattctagcatttttaatgaaaaccaatttatctgatgatgaaattataggattgaaattttcaacaataacacaagaaatagcaatataaccaacaataaaagcaaacaaaataccaagatttctccaaacatgattgtaagtataagtgaaagctaattctaaataaatattaccattaacagcattttctccattataaagagttttagaagctgcagcaccaacaaatccacaaacttgattcagtttagtatcaatattagaataatttggaccattaggaattaattcaaatggagaacatggcatctttaaatgattaaattgcattaaaaccatagcctcaaaagcatataaaactggattacaatatgagaaccatttgaaccaccaatacatcgaaggacgttgaatcatatatgaagaataaataaccattgacatcattgtaataccacaaatacccatagcagcagaagcattaggcataatagatgaaagcataacaaatagagaactaacagtttgaacgatcaaattgacaaataaaaagtattgaaagaatgcaccagcttctcttttcaaatttgataaaaagtagagaatgatgcaaaaaaatgtaatggcaagaaatttgacaggaaattgaactaattgttttgcaagtaattcagctgatggatgatacagtttataaccatattgcttatttaagattggtttatccaaaaacaaagcaggagtttcagctaatgccataattgcaaaatataaacatgaaaagaaaataataccacctcttgagaatgcaccaacagtttcatatgtagtattatataataaggaaccaacgactaatgattgaacagtagcagcaaaaattaaagttaaagggtatgcacgattgttaagaacagtttgaaatcttcttctgcaacaattattcaattgggtaagataagaaacagtataaagagatttttgagatgtatatttttgtttgattgagttatgattatttctcaattcaattagttgattatcaggatcttttttcattaataatttttcattaatttgattttctaattcagcaaattcagatgaacttctccaagcaaattcaaaatcatcagcagtctgtggaatactctttttattttcaaaatttggattgattcttctagcagatggatcagtaacaacagttaaaaattctgaactagtttcacgaggatttttcaagaaacccaagttttcaaaatatgagacagctttatcaattggaccaaaataaatttgtctaccaaggtataagacagtaacataatcaaataattcataaatattttcagaagcttgataaatagtaacaattgatgaagttttgtaaatattagttgaagttcttaaagcttcagcaaattccaaagcagttgatgaatctaaacctctagttgcattatcataacaataaacattacctgatgtaaccattgcttcagcaatggaaactctctttctttgaccaccagatatacctctaacaaaatcattaccaactaaagttttttcaacatgttttaaaccaaataagatttcatataaatttttcatattctcaatatattcatctcttgaactattatcatatctaattgttggagttttacaagaaattgcaaattttaaagtttgttcaacagttaagaatgggaaatgatcatctaattctggattatagactaaaagattattcaaagcttttgacattttttcatgatcaataccattataatttaatacaccttcaacaccttgataagtttgagtttcacctgcaatagttttcaaaaaagttgaacaacctgcacctggtctacctaaaactaatgtcattgtaccaggagcggcaaaacctgtaacatttctaataatttttctagtttttggtaaatcttttaaattatatgaacttggattttttctttcttgaattttattataaataactgaagcaggtttgaaaaaaacatcagatacatcttttaaaactgaagctgcagtatttttaccaataactgttaaatctttgaaaacaacatcaatttcattcatactataacctttttcacgattaaaattaactaaatattgtaaaagattagccaagtcaaaatctttttcatctaattggaaaagttccatttgatttgcattcatatgagataaagttttagataaagtagataatctagtcataacattattatcaatatcttgagtaactgaacgattgattgttttatttaaatcatcataattaccagtaaatttcatttcctcaggaacagttgaatcatcacgattcaatgaactcgaatcgatttggtctgtcatagcaaattaacgtgagtaacacttggtttcaaactaaaactgaaaaagttggagtaatgcaaatggaatggtatattagtacaccctggccctgggatacctttgacttatatacatccattgctatgatataattgatttgtaaacattgacaaaaataaattcattctattgttatcgattcagtacggcggtaaaatttttccatgacaaaaaataattatctccgaaaatttagaaaaatcaaattgccgataattatgtaataaaccctatagtgaggaaaagatgacaaattattaattgaaaattaactgagttggcactgtaggaacggaaaatttaaaaatcttgtgagacttacttcccaattaggaacttacgtccgtattttaaaatctgtcaatttgattgtgacttggcaggcggagatatctcttatttcccctttcctttcccaatggaaaaaataaaactgtagtcgtgggaaacttaggagggacggatttaaaggaaaacactgtttggtaactataataataataataatagaggaaagtaaacaaaactaaaaaaaaataatagatttaacctccacactaggactcgaacctagaatcttctgatccgtagtcagacgcgatcaccattacgctatgtggagtgttaatcaaaaaagttgttttgaaaagtgacacatgattgtttattcacgtgacctagaatttttagcatttaaaagtgtgtttatggtgtttattttagtgtatttgagtggtcaaaaatatgtttattatgttcaataattgtttaaacaagatttatttagttttagcttcaaattgaaagaaaaggcttttcgaagttagacagttgattggaaagtcaataaacacggcggttttatcaaaaggatagctggataaggatttaaatactaagataaaacaggaaatactccattaatatgcaaagacacactacttttacactccatgtatacttatatacatctacagttttatttaatttcgattattagtttaaaaaattttagacattatataaagaatatttgaaaactaatttaagcttcaatttcagtttcaatttcagtatttgaagattcatcaacattatcttgttgtaaagctttcttttctcttgcttcctttgcatctaatttttgtttatggaaattcataattacatcaggagcattaactctttttccacgtttttgaattaatgattgtacaattgattgtaaattattaatattattattccaatttgaaagtaattcattaatttctgaccaattaaccaattctttatttgcagataatgaaggaccagtaaaattaattgaattaacaataattgaattagttgattgtgataatttaccattaattaaattttgtgaaattaaatcaaataattttaattcaattgtatctattgaaattttaagatcatttgaaatagtagtatatgataaagtgtttgttgatgattttgctaaataatttaatatagttaaagttaataaattagattctaaattttctaaattaattgataaattttcaaattctgatttatttgatataaattcatcataatttccgattaaataaatatttaataatttagataatgatgttgatgatgatacttgtttgaatgattcagataatgatgtaaggttataaatttgagttgaacttaaaagtgtagaaaagaatttatcaaagaattcggatgttaatgataattggttatcaagtataatttgttggaaagtattgaaagattcaaattcattttcaattgaatgttgagtaaatatttgaattaataattgtgattttaatgaagtttcaatttgagaatcaatagggagtaaccatttttgtatattttttgatatattttgaattaaacctgaaatattatcatttataataattttaacaatagttgataatgcattaaatcttataactgaattttctgataataaattgaaaatatttgttaatgaaactaaaattacatcatttggaattacagtttctgtgtttttagttgaatcaatattattaattaaatttgataataaattatgttcattatctgaatcaattaatgaaactatatgaagatatgtgttaattgaaggttcaaaagattttcttgaaaatttagttaaaaataatgattgaacattaattaattgattaataatttcatcattgttattttcatcaagaagttgttgaaatgttgacttataatgatgatcctctgatttcaactccatatcaagaatagcagccaattcaaggattgaaaaatgaaggtcgttgtctacaacaatggtaaatgacattctctttgttggttcttagttgtaacagtgaaacttcaatagatttctacctctttcaatgtaaatgtcactatacttaaagcattgaaaattaaaatttttcatgaatcgacgaaatggaaaaaaaatcatttgaatttgttacccgctcttcaacttattactggttgttatagagtgtatatagctaagtatagaagagaagagagaatatcacaacatatagataacaatgtcaggacccacagctttatatacaaacactaataatgaaacagaaactaaagaattcacagtttcaaaagatgtttcaaatttatcttctgatggtacaactacaggtccatctccatatttattagaatcaaccaatggtgaatacattgacaaggataaacctgcacctcttaatcttgggaacccaatgggtgtattaagaggtcaagttactgatttgcaagatcaaataaatgttttcttaactgaaagaatccaacagtctaaaaatggtgatgttgaagaaatagatgaagatgaagatgaagaggaagaagataatgaagatgaagagtagttcactcatcatatttactttgtaaacatgtaagcttcaccatatatatataatactcttgtatacattttaaaacactttgctagaattgattaataattagaggttctcggattttgattcggacattgtatataaccaaccgtttttcctttctttctttccatttaatcttttggagacaaacaccagtagaatgataagtggtatacgtgttggaagtctggtgtcttcgataagacttttctccacatgtaaagttaattttactaaaattccatcaacattaccatcaaagggtcttatatcattaaaaaataattcaaatttccttaaaatttcaggtaaggatgcatcaatatttattaatggattaacaactattaaattactgccacaacatttaaagaagaatcaaacaactatttcaaatgctgatattaataatgaaaatattgtaaattcaattcaattatcaaatgatttaattaataatagtaattgggggatattgcatgaaaatgaagaatttgatccaactaatgaagatgaattaccaatgagattaggtattagacgtgatggtagatattctaatattttaagagctaatggacgtatatttagtgatgttttcatttatccaacaccatttttaggtaataatgatgaatttccaagttacttaattgaaattttaaataaatcacaattcaaaccattgttaatgatgttaaaattacataaattacgtgcaaatgttgaaataagtgaaataaataatatcgattcatggttttattatgatgatgcaagtgaaggtaatgaaatttatgattcattacttgatcaatattttgcaaatgccaattccaaagatattggatcaagtaaaacattaagtgaattgtttattaagaataaagttttatttgattttgatattgatccaaattcaattttaggtttagcaattgatcaaagaaacgattattttggtattagaattttgatgaatgaaggtagtgttccccaaattcataatatttctgaaaaggatatactgccatatgaaaactatacaaatagaagaattaaatatggtattgtcgaaactagtgattttgctaatgcatcaattttaccattcgaatgtaatttagattggatgcatggaattaattatgataaagggtgttatataggacaagaattaactatacgtacatggacaggtaatggagcaactagacgtgtattaccaataatattcaatgaagagataaaaggattgaatgattcatatgagaaattagaattaaaagcaattgtgggaaatgaagaagttgaagagaaaacaaaggaagaagaaaaacctgtatataatccatttggaaaacctagttcttcttcctcatcttcacgtccacgtagggatgtatcaaaagttggagaagttttaataaataacgggaaggaaggattagctaaagttgagaaaaggtattttgattgggataatgaagaatctaaacaagtgaatgtggttcatgatggtaagttatacaatgcaactataaatactaatgtatggaattaaataaaatatatactttaaagacctttttcatcctttaaccgtcgtaatctaatattttcctctcttaatagtttaataaagtcagaagttttgtttaaaacgattaattctgatctaccctcttttggttctaaatcaggtacgagttcaactaatttatcgaaagttgatctgatcaattctcgtcgtctgttttcacttcttatatggttacttttcttttgttcctcagatagagtatttctgtgtttctttgtggttgttgtggtgtcattattatcattattttcattattgtcttcattattgtctccattttcattaacagggttactattttcacatgcaaaattattatcgacttcgggagtcgatcgactgtgtccaataagagaggtactcattatatagtgaacggaaagagtgatataggggtgagagagtaggtgtataagcagcacactgtgaatatataaacccagagacagtgtcgataataataataatacaaccaaagtgaaaagagaaacaacacatgtggtagttaataaagttaaacaataatacttcaagtgaaaaaaattgagcctctctcattactatttaaggacaagcgcgttttcttcatgtaaagctattctattgatattctatttactttactttactatcactgctttcttttatcagctgaatcagtatattatatatatcaatcatgtcaatgtcaattgattctattctggataaagtatcatccttatctaatgtacctcttataagttttatttatatcggtataacagtattcttatctgcaattacttcatatattagaacacaatcttatcaaaatttaattaaacaaaattcagaacttttatttgatgacattattataccttcacttcaattagttccatctcatattgtattccatccttggactctatggacaagtacgtttgtggaaacttcaccatttcaattcatttcaggtttattcattatttatttcggtatttcatttttagaatctcaatggaatccaaatatttcaattgatggtaatgatgattttagtcaatatttaaatacttcaaaaccaattactgaaactttaaaatttacaactattataataatttcatcaaatttaatatctcttttattaatttccttaattaatataataaataattcaacaaataatttaaatttacctttacaatatggtttatttatattagttattccaattagtgttgttgctaaacaattaactccagagacaaatattaaattattctcattatttaaatttcgtttaaaacgtttacctctcatattattattatcatcattaattttatcaattttaaaattttcattatcaccatttttaccaggtttaatatcatttttaacttcatggtattatttacgttatattcaatattcacctgcaattagttcagaaattttaccaacaactgaatcttcttcaagttcaatacctccaacaacttcaaatttaattagaggtgatccatctgatacttttgcaataatcgaatttttccctgaatttttaaaatcaacattaaaacctttatttgatggtatttatcaattatctgccttattaggtataataaaaccttggaatgataatgatattgatattggtaatttaagaaataatttgagaatttcaggtaattctacttcatcatctactgctataacgcataatttacaatcaaattcagatattgataatgaaagaaggaaacaaattgccttaaaagtattagagaatagtgttgatcgtaaggattaattaaagttatataaatattaaactagaataatgttatatagtaaaaaagacactaatcatctttattctttaattgagttttctcccaatatggtgtcaattgtttttcacaatttgctaataatttacaatttgcaaaactaataacaaaatcatcattttgataagtatatttaatatcaatatctgcattattattaactcttgcattaattgttcttggaggtattataacagttttagataataaaattggatgccattgtaaaatatgtgataaagttgttgaaacatcctttttgaattttggataagttttcattaatggatctaaaactaaatttaaaattgctttaccatataaattattctttattataaaattatcaacactgataccattctcattttgtgttaaaattatactaatatcttcaaatttaacatcactataagttttaataaatccatcaggttgtaaaattgattgatcctttaatataattggttctaatgattctttctttaatatataattattaatattaatttgattattcattataaatgaagtttcatcaatataccaaaaccatttcgccttggggaatgcaatcattgcctctctaattgcaattattcttgaccaactatctaaactatttctagttttttgaaacattggtaaaaattcctgattccaccttgaataaactccataattattagtatgtgcataatctactctattctgaataattttaacaatatatgaaggatttaaattctcaaaattaattgatgtaactaaaataatttcaggattttcattacctttataaatcttacgtccagtttgcttaaatgatttcatcgcattttgttgtgatagagagtattttggtttaatttctgaatttttaactgccttttcattttgatctttatcaatatttataatctcttcatcttcatctatatcttcataaaaatcaagtgaatatttgtaaaaagatttcggattctttggattaccataagtttcaacatcaaaaaaatcttcataactcaattcttttagagtattaatatcttgaactctcgggaagatatatttatcagtaacaggtataaaacttgtacttttactagttaaaccatgtaaattataggaacctaaaaatttagattgtgtaaatttaaagaaattttcaggtggtgaatgattacctattgaagttgtaaatggttttggtattatattaccatttatcaaataatttaatatcaataataatataacaattggtaaataatcagttattataacaggtaaattaaattttgaattataattataatttgaatctaaatcaattccaaagtatttttgaacatttaatttgaatttttgtattgttttagaatataatgaatctaatccattgaaggatttcctcttctttctatagagtaaatcagggtttgattccattgataaataagtggtgtatcggaatagcatttactgagttgctctatttcaaatcgcgagtttgtactatacacacatgtgtgcttgcattttgaaccttagttataatagaagtagtagtacttatcttggatattacagggtatacaaggtaaagaatgtcagatgttaaacaaatggtaatggagatgcaagtacaactctccaaacatagagaagaattacagagaacattaaatactattgaaaatgttagtaggaataattcacttattgaaaaatcaatgaaagatattaagaatagtaatgaaaaatttgtttgggaatcagttggtcgtgcatttgttaaaatacccattaccgaatatgaaattgaaatgaagagtaaaattagagataatattgaatcaatgaataatcttaataaaaagaaacattatcttgaaacttcaattaagaatacaatggatagtttgaagaaagtaattggaacacaatgaatagattattaatctttttttatataaataacttatacagcactataaccacctcttgaagatgatgaactacctgtaattttacctattatttccattaatatacgtggaattgtagataaactttcaataactgtatcaaataattcattaagaaattcacttgatgtacccattgtacttgtattataccaagcttgagcaactaaataagctgcaaatataatagctgaaataattatgaaagaaccaaaaaatcccatacttgattcattcttaggtttattattatcattattattatcaccattattatctttaccatcacttgaacaaaaatatttatttttccaactgaatgttaaatcattttgaattaaataagttggatcaatccattgaatatcatcatcaaatgaatctgaacattcgaaatttatattaacatttaaattcaaatcaccatatttaacattttcccaattagcagttaaattattattaccaataaaattaacattatcaagatttaaactaaatgattgaattaaatttttatctttattattatcaccaaaagtatttgatattatagcacaaactgttgaatcatctgggcatccattacctattttagcagcatctgagggacctttactgaaaaggaaataccaatcatcgaatattgttgaaggtggagtattatgagataattttaatgtatgaatacctaaagcatcatcattaattaataatgaatcaaatgggaatttagatatatcaaaagcagatacaattgatattagtaagaatataaagaagttcataaatggtatgtttatcaattagttacccttatagagtaatgtagcttctttatagataaccaacccaatcttaaagagtatataatgataataacataataaaaaccctcatttagttaccattggttacgtaatatttaattaaagtgaaaaaaattaaaatttcaagtataaaaggaagtaaatatccacttttcttaaggtatattcttttgaactttcttctttctttgtcgacgtacttcataggatcatttctataggaatcgtcactttttgactcttctaaagagccactgaccccaacttggttgatgagatagaacccccataccctcaaagtgagaataaatgtaataattggaagaatttctttcttttattataatagtaaattatcattacagttttgtctacgattcttagtaatctagtcatctggataatttacgaatccccaaacaatccgctttttattccttttttcatcaggtaaataaaggagcaatgatctttgtcttaattaatgtacttcttcggaagtgattttttaagatgggaatgggtggctgtctgacaagtaatacaattaaaaaagttggagtgtgttgaccattgtaatctttgtaagttttgttgtagaatgtagtcttgttttgtctattgatatttttcaatcggaaaattcagtctttcaacctttgttactattactcttcggaattttgaagataaatattatctaatcagcttaccattacgtaaaccattacttcttattacctaagctattactaaattaattactttctcccccaaaagattacgtaatgttatcaaataaagcatctaaactttattcccaccctcacaccacatactaacaatcaatgtgactgcgtttacaaaaacagccacaccctcactccagctgagtgaaaaaaattttaatatggtgtacagatgatatctcactttaaattttttctctctctctcccatagtaattaactatgcgttgagagttagggggaatgaatattggtgaaaaaattacctttgtctctggaattttgaaaaatttacttgattgtatattatattagagattaaattatcatctaattatttagtttcatttaatttccctttgaatactatcactcaacaatggctagatacgcagcagttccttcaaacccagctaaatctgcttctgcaagaggttcttacttaagagtctctttcaagaacactagagaaaccgctcaagctgtctctggttggaaattagaaaaagctcaaaaatatttagaacaagttcttgatcatgaaagagcaattccattcagaagattcaaccattctattggtagaaccgctcaagcaaaggaatttggtgttactaaggcaagatggccagaaaagtctgttaaattcattcaaggtttattaactaatgctcaagcaaatgctgaagcaaaaggtttagatgcttctaaattagttatctctcacattcaagttaatcaagctccaaagatgagaagaagaactttcagagctcacggtagaattaatgcttaccaatcttccccatctcatattgaaattattgttactgaagaagaagaatctgttgcaaaggctgcagataaaaagaaagttgctttcactagaagacaattaggtagaatttcttcccaaaagagattaactgctgcttaattgtgatatttttatataattatgatcaaaataaaatataaaaaaaactcttaatactctctttctatagtacaacaaacaaaataattatcattgttaattaatttaaaaaggtttcattataaaaaactattaaaagatatacaaattattaaaaaaaaagctacattaatacactacttttaatccttttattattagtagagtctacctcataatcaccttctcttttccttatcgtatctcctaagttttctaattttgtaccttccaccattgataaactatttaaaacatgaaactgttccttaatacttcgacttaacataactcgaatagaaaatatcttgtaaagttctaatccattaggtgtttgattccttaaattgtaaaatatttttaatatatcaacaaaattaatttcatttgaaaaatttaaatctgattcaatcttaaaattatttaaatctgtaaaaattatttcaatatttataatatcaagattaatatttaataaatcttttaatctattgaaaatttcactaaattttaactcaatacattcaaataattcattaaataatgaatcgaattcagagtataattcatcctcttgacattttggttgaaataatttcataaaatcaaaattaatattgatttgctctttctcatatgttaattgtttattactattattatccttatcgccaaataaatcactaaaatcaagatatactggaattttctccatttcttttaaatcatcgatgtcactattattattatcttcaaatatactatcttgccctatatgtaaatcattattagtaacatccaattccccaatattttcattctcatattcttgatccccttcttccccttcttccccttcttccccttcttcttcagattcactaaaatcatcaataacttcagttacaatagtttgttcctcaacatcattattactctttaattcttccttaaattcttcttcaaattgtttttcataatattcttgttcttcagcttcatgtttaaaagtattttcattatcaacttctccaacatatgaaggaatttcttcaacaaatggaatgttttcttcgggttcttcttctggatcttcttcctcttctaacccctcctctaattcatcttctacctctacaaattccacatcatcaaccaatggtacttcatccacttttccggattggctctctgtataaaccatctcaatgtgttcatcatcactctcatactctaactcttcatcacctccatattgatcatcactcataatattcctataatttatgtctagttaatatagcaaaataagatataataaaataaaacttactacaattcaattggatagtctatacctactgatattacttacctctattgtttcttgaacaagtattgataataaatgaaagaaaaacatgcactgttggtgtagtcataacttaaatttcagctcagtatactcggcatacatccgcacttttaccttttcaggatattaattattccccctttaggactctttattacttttgccactttaatacacttttttactatctgatcaaagcaactattggaatattcatgcagtaccagagtagcttacagcgtatgaattgactgtaatgcttttaattttgtccccctttttaactgttactaactgattatattttatagatgaaatctcactgataagtagtgataattctgatgattttgaaaacttaacacgaaatcagaatcacaataataattatagaagtaagtatatcaaacccacatccacacaatcaaataattatgttagtaatatttcgaaaaatgtaaatgttaatcaaatacctgagagatacagatcaattttcccctttacacattttaataaaatgcaatcggaatcatttgaacaaatttacaaaactgatgataattgtgttatttcaagtccaactggttcaggtaaaactgtattatttgaattagcaatcattaaattattaacactcaaattaaataatccagattatattattaaaaattcaaaaatattatatatggcaccaactaaggcattatgtaatgaaagatatgatgattggtgtaagaaatttaaatcattgaattgtaatgttggtttacttactggtgattcatcatttgttgaacttgattctgttaaaaaatcagatttaatcgtttgtacaccagagaaatgggatgcattaactagaagatggtcagattatagtaaattattagatttggttaaattattacttgttgatgaaatccattttttaagagaaaaaagaggtactagtttagaagttgttatcacaagaatgaaaacaatgtcattaaatttaagaataattgctttaagtgcaacagttccaaatatttatgatgtttctaattggttgggaaattcaaatggtggaaataataataatagtaatatacaaacattagtttatgatgattcatacagagctgttaaattgaataaaactgtttatggatataaaactgctggaacttcaaatccattcaagtttgaaatgttcttaaatggtaaactacctgaagttcttgaattacattctaagaataaaccagtgttgattttctgtccaactagaaatagttcaattgcaactgctaagttcttgctgaaggattactcaatgcctgataataataattcgatttcaaatatacctactggtataagtaaagaaatttcagaattgattcaaaaaggtattgcatatcatcatgctggattaactacaggtgaaagaaaatttattgaagataatttcattaagggaaatattaagatattatgttcaacatcgactcttgcagttggtgttaatttacctgcatatttagttattatcaaaggaactaaagtttggaataatgaatcaatggaggaatataatgaacttgatttgatgcaaatgatgggtagagctggtagaccacaatttgaaactgaaggttcatgtgttataatgacagattcatcacagaaggatagatatttaagattggttaaaggtacagaaaaattagaaagttccttacatcttaatatttatgaaaatgttactgcagaaataacattgaaaactattacatcattagagtctgctttcaattggttacaatcaacattcttttatcaacgttatatgcaaaatcctactggttatcctttaattctatcaaaagttaattcaaatcatccattagaagttcaacttagaatttatttgaaagatgttatcgatgaattaattagggagaaaataattgaagttgttgataagcaatttgtttgtaccgtctatggaaatgcattgagtaagagttacgttttatatgaaactatcaaaaatattattcaaagaaaagaccaaatgtcattaggggattgtttaacattattatcaaaatcacatgaatttgacaatcttagggtaaaaatgccacaaagaaaattatataaggaaatcaaccagaaccctttaatgtttaagcctttgccaaatagtaataaaattgaaacaccagccgaaaaggtatctataattatccaatatgaacttggtggaattcaatatccaacataccagggaagtatgaagttgcatcatgaatttgtgtcagaaagattaatgattttcaagaatttgccaagaattattaaagcagcaattgaaatattagtatttgaaaaggattcaatttcattgcaatcgatgttaaaatttaatagatgtatttgtgctaaaagttgggaaaatacgtcattagttttgaaacaatttgatggtatcggtttagcatatgcaaaaaagctaatgagtaagaagataacaacagctactgaattgaaaaagttaccaagagataaacttgaatattatttaggtttaaaacctggtgcaggacagaaaattgctaaaagtattgctaatatgccagaactaagtttaaaagtggaaaacttgaaattaaataataatggattagtcgaatttgaagtttatgttgatttattgaataaagataataatatatcatttatttggaatggttgttttgttcatattaatgtattaacagatgttggtggagaaatatttgatttccgtagacttccattaaaaaaattggttggtggtaaaagatttactttgaaaattaatttaaagtataagtcagattatgtgaagatacattttaattgtgatgaaattgcagcagtgggtcaatcatgtgaagttgatgtctctaaagcagtttcatgtttaccaaataaacctggtaattctttgaaggaggtagaggaaaataaaagtgatgataacaatagctcttttgtttttgatgatgctgatgatatcgctttaggacttttagatgatgatgatagtaaagttggtactgttggtatttctagaaaagtagaaaacgatacaccaaagttggatacccaaaattcaaaaattgaaactagtgataccagtttgagtactgaacccagttttatggattgtgcacataaatgtgttgataagcaaaaatgtcgtcatatttgctgtaaagaaggtatacccacaaataaagttaaatcttgcaaacatgcatgtaaagataaaagtaagtgtcgtcacatgtgctgtagggagcaattcgaatatgaagctaaaaccaaggctaaagcagcaaggcaaaatactttagacttgagtttattaagtaaaggtaaatcagctgcaaattcatttatggaattagataaacgtgcaaataatgtttcgtcatatgaagaaattgagtcatcaagtgatgatgaattgttgagtaaaaagccagcagttcagagtaaagccaaagtagctgaacttcctgtattcttgaaaagaattgaacaaagagtaccgttaaaagatataaccgatagtgcagtgaaccaaaaaagtaattccgaaatcaaattcaaaagacttgaaacatcaaagtattttaatgatgcattcaaagttagcaacccaactaataccaatgaaagtaaacttttggatatgagtgaagacgattctgatgatttcagtgattcctttgatggtgctttaaacatggtactcacatcacgtaaaagagttcaaaagatttcaaagaatgatgattttaagagaagtaaattaatgaaaccacaaaatgaagtgaggaataccactgatattgcatctgctgtacgaattgctaaacagaaaccattggaaaaaatagagaagaaaaatgttgagctaatcaatccaaacagaaatcgtattatgtcggttgaagatgttgttataactaatctggaactaccaaaagtcaataaattatcaaccatcgtttcaaacaaaagggtaaaaccccatgagagtaaatcatatgaaaagacatttgatagctcaaacggttcaattgaaaatcttgaagatacggtaatgacatcaacaacggatattcatataaatccaaaagaagtattaggatttttagactctgatattgagtttgattgatttattaactgtgtagctaattatactatgtaaagtattgaaataaaaagtatttatttaaaggtaggttttagctaaatagataacatcatcctctgacagtcttaagtggaggtcatcaatacttaaaaagtccactttattttccttatctagctttcttagtcctaataaatcatccttatacgatcctgtttgattaaaaggaataagctcaccagtaacattatcaatatcgtagaaccaagcggtttctttaggcaccaaagtttcatcttgatcaaacaagatcatcacgaacttattcaatgcagtcaatcgttcataatataataaatccttgaataactcattattaacgtatttaagataagctgatttttcaatataagtatcgtattgttcaacatctctgaaatattgtgcttgaatattattattttgcatgtaatcagtatagagactatttttgatcaatttatttcttgttttacacatcatattatctggttcacattcaggtaaatcagcaaatccattttgtggactaccaactgcaataacattattaaatttaatatcacaagtttgtactaatgatctaataaacaatccaccctgtgaaaatcccataccattaaaaactgtatcttcatcataagataaatcttttatttgatcacatactttaccaatttgagtcaatgcatcaccccaaactgatgcagatttatcatctgatccatcctcttctatgtaaattgaatgaatttcaatacctggatgtgttttctctatagtattagctaaacattgcattgcatgtgaattatatgaatcacccattccgtgccataaaagtacagggttgtgtttagtggttgaaattgaaggttctgacattgtagataacaatgatgtgtgattggataatctgtagaaacattcctctacttcagttacgtttttgatctcatttgcaaaaagaaatctcaaaaaaaatcttatgatgaattttattatatccatgataattgagttagttagttttgtttaacaaatattgcaaatgacaatggatttaaagttgaaaatcttctcttcgatgtgtttaattcgaaatacatttgataactgcgccatcttaagataagataaattttctttctctgtggcgcagattcttaaaattttttttcgatcacttataatttttcagtaggttttgtaagagtgtcaatcttggatgattcttcttatacaaaacacatattaaagatgggtaaaaaggggatattaaagaagaaagttgtcgaggaaaagaaattgaaagaaaagaaagaatatgaatataaaatattaactgaaacacttagggaaaaggcattacttgcagcagaagcacagatatataaattaaacaaagatggtaaaacatcagaaccaataatgttacaattaagtacacttttaccaaccagtaagacaaaagaatacacgaggcgtatgattgttataccaaatagattacgtagtgttaaaaatacaacaattttattagttactaaagatccagttgatacttatcgtattccattaaatgataaggaatcagttacaactgatacatttgcagatattgttggttataagaaatttaaattaatggtaggaacaagtaaggctgctttaaagaccaattatgaatatgatatagttataactgataatagattacattcattattaccaaaattacttggtccaacagttttctgtaaaacttcacaaaatttcccattaatgttacaaatggcaccacaggatgttgatgctaaattagttaaatctaaaagatcaggtaaaatgtcagatgaacgtgttgatcctgaatatatcctctcacaaatcaaatcatggtgtaaaaatacaacttttgttccctctgttggtccttcattatcaattattgttggatattctaaaatgaaaggaattcaagttgttgaaaatatagatgctgttctggattatcttacaaatgaaaagtatagaccaattggtggagtactgagtaagggaattgaaggaattgttgatattcatttacgtgctgatgaaaaatcacttccaatcttgaagaagggtgaaaatatatagtgtgtgtattataagattatagacaatagttaaagaaattatacaacaaaaacttggcttattttagagttagttataaaaaagattatgtttcagaatgtttctttgaacaaatgagttataagcagtgtggaaatattttaaaattaataatgtttgatacctttcaagttgggctcaagaattcttcaatgagttgaaaactagcattgattcattttaataaaatataataaatgtgtatctggcactttattatactcttcaatgctattttttaactcattgaactccttagttgtcatatcccgactaggagaattcttcaattccacttgtaaagtatcaaatggaagttcattaatattgaaatatatatcaataccacagtgtctataacccatttgttgtgttggaacaagaggaacataatcacctctatgtgtgactctgaaatatgtaggatttttatcaccaatatagccagcatctaaagacgcataattattctttgtttcccagatttcatccatccatgaagaaaatttagagttaccaatttttggagcaccaaatgtaacaactgtaggatatttacccattaataaacattctgttgcaataaaaggtgctaatgcaccacctagtgaatgtccagttaaaacaattttgtagtttaaattttcgtttgatagtttcagcaaagtaggaaataaattgtcatatattatctttgcggcgtcatagaaacctctatgaacaccgcaattcttgcactctttgttagtgccaagatattttttccaaccatttttacttctgctgaaagaacgatatggaataggagtgaaattaaaatccaacaaccattcagtattagttgttgtgccttttattgaaagaataatttctcttctataatcatcttttaaaatcacaccagaaacaataccactataaatcttttcaacactgacaccagaataagaatctgtacataaagtacataaacaagcatcttttatattacctaatttaagtaaattaccctgtgtgagataagaaagggaagcgtaatcagcagctcttgccattgaattgaagacttcattactaattgaactagcagaggcagaagtatcattccagaattctgatgtattgttaataaatagtgtgttgataccggtggtgaataataaaatgatagtaattaattgatgtttaaagttcattgtgtatattaattaggtagattattggtttgtaaaaagaaaaagtaagtaatagcaaaaaaggtcaagcagtgtccataaaggtttaaaggcgccgcaaagctggtatttatagcattctggtgtaacagaataattccatagctcaagaggaaatagcagtaacagaataaaaatgaaaataaaaatgaaaaggcaaaaagctcaaacagaagaaattgttgcccttttatacatagtttctgcaaaggggggcaattttaatctaatttcattataactatatacccctcctttaaaccttctacaacgttctttgatgttctacactctagttaatgatagcaatgtttgctacttttcttacatgtcttttattctgttataagcatgtagtttgtgtcttttcatctatgatcacattatgtgggtatcattagtaggatgtaataaacagtatgtgttaaatattctactataagtgtatacaaactacattgtaaaatggtagcaaacagtttaaaacagtctgctaggacaataagaaatgaaaaatctgatttaaaaaaatgctgagccttcaacatgctatcaattacgaaatttttcgattgttgagaatttaatatcgagttgagtattcattgaattgattaccaagattgctatatatccacagcaggttatgttgagtttattacggaggctggtacctttattggtaatatctatacttatatttccatatattaccagattagttactattagaacatctataatttctaaatttaatacatttgaagaaatataccaaaatagatcagatgatgcacaatttttccttaatcgtgcaaaacttaaaggtgcaacaaactcttatgttgaaccaatttatttaactgataaaaatttagaaaaattaagaaatgatgataatattgataaatcagtgtttgataatgaaaatattaaattagagaatgcaactttattagttttatgtcgtaattgggaattaaaggatattttatcatcaatgagatcacttgaggatagatttaacaaaaattatcattatccttggacatttttgaatgatgtaccatttgatgaagaatttataatgtggacaactgaaatggcaagtggtaaaactgaatatggtttaatcccaaaagaagattggaatacaccttcatttattgatcaagaaaaatatgaaaaatcaattgaaaaagcaataaaggatgatattatttatggattttcaaaatcttatagaaatatgtgtcattttaattcaggttatttcttcaggcaagaattaactttgaaatatgattattattttagagttgaaccaggagttgaatatttttgtgattttcaaatggatccttttagattacttagggaaagtggtaaaaaatatacttttgttgtttcattatatgaatatcctgaaacaattccaacactttgggatacagttgaagattttttaaatgaacatccatcatatttacatccaaattcagctattgaatttttaacaagtaaagcaccaattggtacaaatgcattagatttaggtaattcatcatataatttatgtcacttttggtcaaattttgaaattggtgatttaaattttttcagatcaaaggaatatcttgattattttgaatatttaagtaaatctggtggattttattatgaaagatggggtgatgccccagttcattcaattggtgcagttttattattagataaagatgaaattttacattttgaagatattggttataatcatgttccatttttcacatatcctgaaggtagacaagtaactaaatataaaagatgtgttgttccaaaggataaagataatataaatgttaaattaggtagttgtttaccaagatggtggaaatttggttcaggtaaaaagtttttaaaagagtattatcatgaagatgaatatttacaacttaaaaaactattaaagcaatgaaataaagataatttaaaattgattttttgtaattttagactgttaattaataagtacagatgtatatagaaaagtaaaagtaaagtatagaaaaataaaaataaagataaggatacacgaatatgaaaaagaatataatattaattattaaagcaattaagcatagtttgattctaatctattaagttcatctaaaattctttgaagatcaattttatcctttttatcaactaaacttggaattaaagttgttgcctcatcaatatcttcacaagataatgaacctaattgagaaatctcaaatggatgtaaaattgaattttcttcacttttcaataaagtttcaacagctgtacaagtttcaacatctttaaatcttgaaaatgttgataaatattctaaagttttacgtaaaatttcatttgcacctggagctgttgataattttgctaattgttcatcctctggttcacctggtgcatttaaaaaatcaatatttgtaccattaattttagatataagttctgcacgttcctttaattcagtacgaattaatatacgagcttcacttaaattaagtgcaactaattttgattcattacctaaagcatcaacttgttcaagttgaaattctggacctaatttaagttctgatgcattttcctcatcttctggttggttagctttaccacctcttcttctaacaacaactgcggatgtagacaagttcattatactgaaatttgctagatgtttaaagaggaattacagaaacgaagcaatattgaacctacacattacttcttgttttggtgagaagtgaaatgacaactttgtcaaggattacgtaatttttacactgtaataaacctttcttttcaccaaaaacatataattcacagtttataataaagaacataactaacataaagatataaagatataaaagtataaagatgtaaagatataaaagtttaaaactgatcttataatgaaaatagtttctaaaatctgaaaagatgattaaatgataaaacaacctgtatttttattgtattgttgtattttattatttattattatatttacaagcatagtataataatgatccacttacactatttgaaaatcaagcaccaagtggagcagcaccttgatcaggtacaggcataggtacaggtttattagcataagccatatatctttgaaacatcataccgacaccttcaagaatacctaagaagatagcacaagtaatagcagaatttaacatatgtttccttccacctctaacagcaagagaaccaccaacacagaaacctgcaataattgcattccaagcatcttcacgtttacgaattgccttaattgaacaatcataaaatgagaacagaccaccccaaacaccaaaattaccaccaacaactggtgctcttgcctttattgcacttaatgcaccaattcttctttcaccatatggtgaatttctaaaacctttaataccatgccaaattgaaccaccaataacacccatagcataagctccaccaaaatcgttaagaataacaataggacatggatctcttgaatgatctgcttcaggtgtagacatatttacttgtttatattaacttaactaaagaatatattcgtttaatataagagctgactgattaaatctgaaaaatttgtgagtctccgctgagagagagtttggaaactgaaaaaatatcggagaagggcaatttttcattatttggcgtcgatgcgtcggttgttacgtaatggtatacacatgtattatacgactatacaagacttcttgatcttaaaccacttccatgcgatggttgacctatagctgtaggtgggaaccaggtcccggtccatggctcattagtgacaaatggatggtgtactgcctcatgtggtgtccatctctctaatggattaagattcattatacctttaagaaaatgaactaaacatgatctttcatgcatttcattttcaatcatttcctttgttggattctttctctttgaaattctataattcattataatatcatcaatctttttatcactaaaatattgttttggtggtgcctcattcaaattaaattcagtattaaattcattaagtgattttaatctgaatgatactttaccagtttgtaaatttctttccttaacgaaataattatttgattttttttcaaccatcatccatgatggtggcattccaaatgtctcaacaatacgacataattgttcatattctgatgcaccaggaaatataggtaatccaagaaataattccgcaattatacatccaaatgaccacatatcaacactagttgaatattcaactcctaatataacttctggtgatctataaaatcttgattgaacatatgtgtataatgtctgtctctcttgacatgcactaccaaaatcaataatctttaaatcaggtttatctaatactttaagcagaatattttcaggttttaaatcacaatgaattagtttaatatcctttaatgcacataaactttctaaaatttgaattgcaaaattcttaactaatttaatattcaatccatgatgatgattttgtttaattaattcatataaattagagcttaacaattcaaatactaaacataaatgatatttatgcataaatttatctttcaaactaataaaatatttctcatatttgggatcaactcttttactcaaatattctaagatattaccctccgtaattgattgttgtaaacattcttgtcttgccttaacaactttaattgccacaatttcattagttttcaaattttgacatttaacaacttgtccaaatgtaccttggcctaatatatcaataaccaaatattttttattttcctctgtacctagaatatcattaacgtataaaatataatcatatgattcattatcatatccattattatgaaatggtttattatttttagttaaaactcttcgaggattcttactactctgataatcatattctggaacacaaatagaataagttgaattaagttcagatgttaatgcttttaatggtgaaacatattgtttagttttattctcattttctataactctacgaaatttaggaacttcatgaataataggagacagatcatcaactgaattgattttctcaaatcttggtgtttgtatcttattcactaatgaatcggctctcatatcattttgtaagttaatgctatcatttgaaaaacttacattattataatcataattattactattattattattgttgttgttattgttgggtatcatattaggtgtaccataatgttgattatatatttcatttaaatcatcaattgacatcatacttgtctctgaggtttgtctatctctattgtttctaagttcattattgtaaagatcatcatcatataatcgttgattatgataaacagctgccacactttcacgtcttggcgcattattagaattaagtgatgccatatcattgaatgattgaacaggtcctaatgctcttaatggcggaataatttgttgttgttgactttcaatgcttaaattcatattactattgcttaaactactattagaactcatgtttggttgcatattaatatttgataatcttggttcatattgttgtgaatatcgacgttgtggtaattgttgttgttgtaattgtaataattgtaaatgttgattatgaagttgtttttgttgtttctgttgttgtatttgattaatttgcctttgttttaacaaatctgcattgttagatgtattgtcaccaaaattgttgaatttagagtttggtacagcaaatgaattacttctcacattattaaaactagctatttgttcactatcatttacattgatactattattatgaatcagttgtgacattgataaatttgatggtgtcatcctaacattactcctcaatggacttacattcagagttgaatttggaacaccagatattgaattcattcgctgttgttgataatttgatgatattggtgattgataattacctttgatatagaaagaactattagttggggatgcttgatcaacaaattcattaaatccccaaacatttttaaataatggcttatctgatggtgacaattgtggtgtattttgttgtaattgataactttgtaaattttgataatcattatttaataatgcaccatttggtgaggaagccggtgatgaaccactatgaatatttgataatggtggtaacctttgcatatgagtactaactcttctactgagtcccaatctctgtaaagcaggatctgatggttgtgaaataccaggttgtaatctgctattcaaaacattttgttgatgtagtggtaaatgcattaaatgtggtggctgcggttgttgtaactgtgtttgtgttggcacctgtaatggttgttgcaaatgttgttgttgttgttgttgttgttgttgttgttgttgttgttgttgttgttgttgttgctgtgtttgtgtattttgttgattattcacagaatactgttgaaattgttgaaatatcgtctgattatttgaatctgatggatcattagttatatgtggtggtaatgagggagtggaatttatcattgaatttgatattgatgaattgtttgataatttaggagatgatgcatgatcctttgtatctttctgaatatctttttgatgattttgttgatgaatcattgtttaaggaatgtgaataataatttagtggaaaccaaactgataagaaaatactagatggctgagtttttttttttttaaattggatatataggttattaacaggttcaagtgtctataacaaaaatgtgattaacaactctaaaaagtttaattatgattattagctattgccttgaacaatacaagctgtttgtattgtatattgatgaaataaatcacacgtcgagtcaaagaatttaatttagtcactgtggataaattcaagggaagagtgagggaaaactcaaatttgagatttcctattgttctactattgttatatttttatagtttcattcatatatcttttcgtattactagatttgttactagattttgatagaatataaaaagagttatgtagtagaagagaaaaatagcatattaaacagtaaaaacaagaatagaataaaagaattaattttagggattgataattgttgggaaaaaaaaattttcaactcataaacttctctataataataatcaaaaatataagtgtaggtttaaatttcaatgtacaagtgtagtaaaagaaaagtctttaaattaattaacaactgagtattttgctaatttagaagcacttcttaatttaacaccaaagaagaagaaaatgtaaactaaagcgacaataccaattgaaatgaaacctaaagttgccattgcccaagtagttgacatattgttaaacatagcaacaccggcatgagctaaacaagcagcaattgcaaatgatggaatacagaaagctgcaattgcagaatttgataaaccagcagcggaatatgaatcaataatataatttaacattgctaaccaaagtaaaggatctgcaacagctaagacaaaaccggccataattggtgaccaataattaactgaaccatctgaagtgaaaccaaaccagaaaaggcctaatgggaaaccccaaacagtgactaatgataacataaatctagcttcaggtcttggaacaccgccatttctagctttatcccatttaaataaccaagtttgaataggttgtagtaagataacaaatgcgacaccaacaacgaaatttaaataagtacattcagctgcaattgctgataaaccattattgaaaacaaaaacatcaaagataccatccatgtaaaggaataaaataccataagcaaaaccattatataaacccataaatataataattggttcagtaaccatcattttaagagcttgcaatgcaataaatctcatttcattaaaagttgaagatttttcaataataacagcttcttgaccttcacttgataatttttcttcgtaaataattctataagaaggagttttacccattaaagtttctttaaaataaccaaattctctccaaacaatacctggaatatcttctctaccttccattgctgttgcttcttcaattacaattcttggtaaagtttctggaataaaacataagcaaacaacaaaagctgcaccaataataatattaataataaaaatccatttataaccaagtttagaattttctgcaattgcttcaccgacaataccaccaattgaaggacctgcattagcagcaaaaacgaataaagccattggttgagaagcttcatcagaagcaccaaacatatcaccaattgtaccagcaacattagataaggcagttgaaccacaagtaccaataataaacatgaaaatagcaatcattggcatattaagtgggaaagcacaaccaaaattaaagataacataaaagataattgagaaaacgtaaacccattttctaccacctaaatcagataatggacccatgaatgcaggaccaacagcagtaccaataatgaataaagattgacctaaagttgcaacttgatcactaacaccatatttttcttcaacaataaattcaacggcaacataagaagttgaagtaagagtaacgaaaatttgtaaaatacaataaacaattgtaataaaatattttttctttaaactccaatggaaaggatgataaggattatcaattgcataaggtaaagcagcttcaattggatttgaagtaatatcatgaagatttaaaggttttgataatactggttctatttcattctttgagtccataattgggacattatcaacagaaggtttttcatctgacatggaagacatctttaaatttgcttgcagaaggaacagaggaaagaaagaattaaaaagaacaagtaattagaagaaaagatgtaaagattagatagatggaattgatatacaacagaaaagaaagggcagacaaatgaagatttatataaggaaattgaaaaaaaaaaaatatctaagaaaaagacgtttaattaattaactgattaatttagagtcaatctgagagataacagatagtgtaataatgaaaaaataataaaaataatgaaaaaatgagaaaaaaataagaaaaaaatgaaaatttctgacatgttattcgattacgaacgctaattaatatagtcattgactctgagataagatgatatattccgcgtaattcagggttgtatacgcgttaagagggttgtatacgaggattgcatagtaaaaggtccgcggttagcattggagagcttttctttttatacggaacggtcttgtgcgtaccttctcttttgagaaagcgggtaattgaaatgccgtgtaataataattggggccgtggataaattatactattttgaatgctcgtttctttttattctgcttttttaccagggtttagtgtttcagtcgggtcttttcaatgagcggaactatttttttcaactgataaggattcttatcattttggttggttttatctttgaatctttctttataaatacctttcttttattcagggtttcaacaaaaatcatcgtattctgtaatgaacccttgatgaatttttttattattactttaatagacaaaaatttcacttatttattatatcttgtagtctaattattcttatagttataactaccaatacaaaaatttataggcattactcaccaattccgtcggaataatttactcaacattatttcaggtccgaaccgaaggaacttttcaacatttttttttttttgattgtgttttattcatttaaaatttggaagtattcggaattgtaatcacattgatatagatcgttgctttaaaaccttttcatatgattgcttagtttgattaataactataatatattaatatataaataaaagaccatataactcttgttcctttaaacaaaatcaaaaaagaattacctctaagttcaagttccttttaataacatttttttcttacatatcattccttcctttatcaacaaaacaaataaaaaaatgtcggaattctcaaaattatcttcaccacaatcaacaactgaagaattacaaaagcataaatttgatatacgttcacaagtttggaaagaattacgtaaagttgcataccctgattcacgtttccattataattttgcagaatttattgcagatttccaaggttcagataattcaactaaattaatcttagatagtgattttttcaaagagagtgttcaaaataatggaaataataataatgacaaaaatttaattttcattacacctgataattgtcttgaatctcttagatatgaattattagaaatgggtatacctttcttaatgacaacttatggtatcttcagaggttttttcattgttgatccagctaaaattgatccaaaattatataaatatgcttcaactttagatggaatggaaaaattatcaactcatgtttcgttaaatgaaatcaaacaattaaatatttttgtacctttaatgattacaggtactggtgcaattaatgataaaggtataagatttggtaaaggtcatggattttttgatttagaatgggcaatgttatcaatgattaatgcattagatttaaataaaacaaaatgtgtcgcagttgttcatgatgttcaattattatcaggtattgaattaaatcctgaaattttcgataccgtatgtgattttattgttacaaattcaaaattaattaaagttgataatgcaaaaaagccaaattgtggagttatttgggatttactggctcctggtatgttacaagatattgaacccctttctgaattgtatgaaatggcccattgattttaaaatcccacaaaattgattttattaaatatctatttttgacacttttaactctccacattgatgattctcctccctagagactgtataattataccattctttaatttgttgtaataatagcttatacctatagacacacacatggcattatagactaatatgtatacgtaatcagcaatactatccactgcggcccatcgtcttcccccctcccctcttccccgttactccgtagagacaagatatctccggctgtcaatggagacagtatgtccgacattgagtccatcttacacattgctttaactgaatgtccgtggtatagttaaataactgcaccctgtattctacatgtatatctgaaattgttgatggtaatatcatcaatgcatctcttcaatgcttagatatcatctatctatctctatctatctaactcctatttatctccgtttgtccattcaattttactccgtgggaggagttcataatctaagtcgtgggcatatttaaacaactttattattatttacttcacagtttcatcccttcccccagtttataatgctccctaaaatatggattttggaataccttctatttagcaatacttggggtagcatgactgcaaattgtgattcatgaatcatttaaataaatgtcaatttgctattatttttttcaattggttgttcttgccgtgtctgatgtaatttaattatttcttaaatcatcaaaagtatcacattttaacaagaaaccttaatttgttaattaattaaatatttcaacattattatcaaaatgtccgaatttaagggaaactccgaacatcatgaattaagtcattcaaactcttttgaaattaaacatgaagaaacttctcagcatcaacttcatcatcaccaacaacaaccttcacatcatcattctgcaattcatttaccaatggcacatttatcaatttcacaagttcatgatgatggtgattatatctttatggataacaaaaaatttcgtaaacaagatttagtcaaagcgtttggtggtcaaatgaatccaggatggtcagtaccatcaattcataaatttggtaatccagccccattaggtttaagtgcttttgcatattgtacatttgttgcatcattaattaattgtgggacaagaggtgtttcaaatgataatattaataatggtgctgcaatgttttatggtggttttattcaatttgttgccggattatgggaaatttcacttgaaaatgcttttggtggtttagccttttgttcctttggtggttattggatggcttcagctgcaaataaaattccatggtttcatggtgatgtatcttatacaactactgaagaattaaatctttcaatgggattcttttatctcggttggttactgttcacaattattttactggcttgtacaattaaatcaactattttatttttcttattgttcgttttggtctttttaagattattgttattaacaatttttagattttatgatatgcattcagctgaagttgcagctggtgtagttggtgtcatggcagctttattagcttggtatcatgcttatgccggtttagcaactcatcaaaactcttattatgtagttgagccggtgccaatgccagtcatcggtaaaaagaaagatgatgatgatggcttaggggaagaatacacagattctcaagtgtgattttaaacaaatagcatgaatgattttcccacacataccataaacatagcatatcttgcattttttcatcttttcacttctttcaaaattttactgttcttttcttgttatcttcattttataataagtttatttagataaatgattaatgatattgatcttgtatgtataccataattttacgatgtgaatataattttactaacttataaaattaaggctttggcattggtgctacgtaaacgcaattatgaaagaaataactcaaccacaatcagtatgtcactatatatcatgcttttaaaagataatatccagcgtgtaataaattcattgggaaatcaatcaacacagagctcacaaagtttacagagtctacaaagttcacaaattaatgattcatttccacagctgagcctcaattacaataactgtaataataataatttcgttgaccccaacaatacaatcattgatcagaatgagttatttgatgagatagaatcacaagtatatagcttcattggtgtggggagccaattcaatgaaatatattcacaatcacaaattccaaaaatttctgatgtactagttgataattcaccatttgttgaaattgtcgaatcacaagtagctatatcaaatgagaattatgatatcttgcaaaatcagccatctactaagagctctatagaggtatcaaaaaatacagagttgatcaaatccaatacagattcattgacacttacaccaaataatgaaacacaaagtttctcacaattaggaatgatagaatcacaaacacaaaacagtgaactatgtcagtcacaaaccgtttatgaatcacaaataacttatgagtcggctgagccagaaaaattagcaagttcacctcccattgaaacttgtggaaacctaccagtagcaaagccgccacctcctttaactgatacaaataaggaaattttagaaattagaaaactattgataaaaactaataagctgagtacaattacttatgaaacattaaacaagacaattacttttatttttaaaaaatttgataaactaaataaggaagaaaataaatctaaattgacctgtaaaaatcatttatcaagtggatttttgaatttttttcatataattttcaaatgtataactatcacaaatgcaagactacatgaaatttttaaaataaccattaactgctattcaattaattttgaaaaatttacaaaaagagataggtttcaatatgatttagtatttcagcatatttttgatttaatatatttaaattctttaaatgggaagcaaaaccttgaaaaatatcgtgaaagctattataaaagaataaaaaatcataaagttaaaaataagctaacaatttcagataatgcaaacaatttacaaatcttactttactatttaatccaactattattcatcataattagtttccaaaaaaatggttcgattttatcagataggtttttcattgaggaaagattgagaaaattactatcatttttaatattaaatggaaacaccgagctcataagagtttttcgtaaaagtagaagtaaacttattgatgatacataaaaaaaggtgttagaaaaaataaagaagaagcccaaattaagtgataatatagattacagagatagagtttaaaaaaaaacggattaaatattcaaatttattttattttgcctttgcttgttctcttactggatcaaaataaggatgcatcattgcttcctttgcagttaatctctcttgatgatcgtatcgtaaaactttatctattaaatctaaaaattcatcacaaaccaaatgattattattagcattaacaaatcttgtccaaggtcttcttgtataatgacctaaatcttcatattctggacctaattctaagctatattttttcaaataactgtataaatcatcagtacctaaaactctagctatttgaactaattgatcagtatttgatttaccatgaaagaaaggttctcttcggaaaacaattgaagcaattgttgcaccaaatgaccataaatctaatgaataatcataatatctaaaatctactaataattcgggtcctttaaaatatcttgaagcaactctaacattatattcagtaccaggatgataaaattctgctaacccccaatcaattaatcttaaagttttaattgaatgatcaatcattatattatgaggtttaacatctctatgcattatacccattgaatgtgcataatctaaagcttctaaaacttgaaacatataaaatctaatatcataatcagtaaatgttggatataatgaacgaaattctctattattaacatattcaaatattagagcactcattttacttgtttgttctctcactatatcatataattgaattatatgtggaccacctgataaattttgtaaaattttaatttctcttttaattttctttctctttattggttttaaagctttaataataactcttttacctgatggtaatgcaaaaccatcgaaaacttcactatatttacctctacccactttatcaccaatttcatattttgattgaacaccccatatgattgaaatattttcataatcccaatattcttgaggtttagtcttgtttacattcgcatatacccttgataccgtagttgccatttcccctaaatactggtatcctaactctacagaaaattactagaacgttgaactttggaaaaagccactgattttcatgttggccgaaaaaagcgagaaaattaggtttcaatgttacgtaatgtggttactaattatactactgttaaatactgctaataaatatactctactaaaggttttcaaacttattgataagagattcttgtctttgctttgcttcatttctctgtggaagtgcctctaaggatctaatatcacttaaaacatccttagttttaccaaaataaacttcttgtaacatatttctcatttgaatttcaacatcttcaataattgaaccaatattagctatatgagttgttgaatctttaaacgatacagttttctcagtttgtcttgttaaattaccacttaaatatgtagaattcaattttgtagatttagttaaatcatttgaaagatcaagaataattgttgatgtaactctataaattgattctgaaccttgtttatattcaatttcgaaaacatgaattgaatcccatgatgaattattatcaactgttttctttattaatacaacaccatcaaatcctaatttaccatcatttgttgcatcaccatcttccttatcccaaagataaacacttgaaattccaccttcataatataaatctctataaatatcaaatgaatcattagcaattaattctaattctcttaaatgtttacttggtaatggtgcttcatcatcgaatggtacaattgaaccatcagattcatttatataatcatttgaataaggtgaacgatatgaatctccatcacgattataatcacaacataaaaattctttaccagttttcttacaaattaatgattttaatggtttatcaacacttgctaataaatcacttgctaattctggttgtaatctgcaaatatttgataaattatttgaaattgattttggatctaaacgacgtaaaatatcaagtgctgcatcataagcttcatctgactaaataagaaatttgttagtattgtgttgtaatagtaaattgatgataatatacataccattgtgagtaattgggtatttgtttaaagaaaaagaagtgtgttataaaggttaccaaatgatgctattattattataaaaacatggagcgattttagtggacatgaaattattgtaaatcgtatataatataatctccagatctcatgacatcttttattatcaatttatcaacgaaactatcacaatgttagaaggtattcttactaagataattccagcaactccaggttatctaccaaaatggattttatttatttcagttgttgcaattttcaattcattacaaacttatacaaatatttcattaacaaagaaagtttatgcaaataaacctgaagaagtttcatcattaagtgcacgtacatttggtacttggacattagttagtgcaattattcgtgcatatgcagcatttaatatgactgatgttcatgtttataatttatgtattgtttcatatattattgcattatggcattttggtagtgaatggttaatctttaagacatgtaaatttgataaaggattatttggtccattaattgtttcaaccttatcaattacttggatgattttacaaaaagattattatacaggtttaattaattaattaatttaatgactttatttaactgtatttaatttttcttacaaagaagatatatcctattatttatataattatttaatgacatagtaaataaaacaaaaaaaagcatgaaaaaaacaaatgaattagataaaaatatagtataatataatataatatgtaataaaaagatgaaattacatttcttaatgctttgttggatcatgtaattttaatatatcaacagctggacctaataatctttggaaaccatttttatttaaacaaactgcctttaaaggagttatagctttaacagttgcttgtcttggagaatcatataataatgctaattcaccaaaataatcacctttatttaaagttgcaacaactccatgaccttctttaataacttctgctgtaccattttcaataaaataaaaattatcacctgcttcaccttcagtaacaacattttcaccagattggaaagttttagtatttaaagcatcagctaattttgatctttcataaggtgataaagattgtaaaactggaacttcttttaagaaattttcatataaacttcttctctttgctgtaccatctaataaaattcgtctaaatgtcattctatccaaagcccataaaatacaatcagttttagcaataacagttgcagctcttggagaattatacattaaagctaattcaccaaatgatgaaccatcagttgaagtatttacaactttaccattaactaaataatcaactgtaccattttcaacaacataaaaaaaatccccttcatcaccttgttttataatttcagtattttcaggtattttcttttcttctaatgcaaataaaattgtacgtaaagaatcatcatctaattgattaaataagaaatttttcattacactttcattaagacgagttaatttttcatgagataattgatgaacaggaggtttccaattatcattaccaaaagtatttggatttaaagcttcagctgaaacacttgtccttctatttgcattaaattttaaattaaaatgtggatttaaatttgttaaattatcactatcattattattattattattattatctatatgatgagaatcatttgaattggtatatttagaactgaaaagagagaaaccaggagttggagcatcggaagttgaagttttagttggtgctggtggaggaggtggaggaggggcagatgaatcagataaaggatgtggagaatttaatttagcagaaggatccaaaggatcagatgagggatcaaatgaatttttatagaaaaggtcagacattgagtactttaattgagattgtagttaatgtgggtattgaaaagataaagataaagataaagatcagataaagataaagaagaagatctatggataaaagataaaaaagaaagatcatcagtttaattagtcaaaaaactaatcatcacttttattgtttgtatattacgctatcatgcatcactagagccatgtataatagggaattatctgcttacagtctctctacatattatttacaataaggattactttcttactattacaatattacagtataagatagtaattacaactcaatctactattaatgattgtatatatgccacagaggacatgttctcatcactgaatggatgttagtgatataaccttatgcaatggagagggtataatgccacatagataggggtttggtgggtcgatgcgtcgtttgtgtctggtcgatagtctttgattattacctctttgggaaatgaacaaatagataaagaatcgttaccctcatttacacaatgatgacaaggttattcactgtgtaaattacataccattaaagataagaaatgcagagagacgcgactgtgttacgtaatatacgtaatgatttctattatttaatccactaaaaggtagtaggggcctgtacttgccgttagatgacataaaagtttgaatgttgatagtgtttttgctagtggtaagtggtcaaattattggaagggcaaatggatttaattaattatttgattattacacattcctaattgggttattggcgacatattagcgatattatgctcttttcttatctttagccctaccaatctttgatttcaagtttataaaaggcaaaggttttgctctttatatcctgttccctctattcttttcttaataatttctttattattataattattattattattattattattattcatcgacaaaacgatataaacaaataactttatatattatgacaaaagatttttcaacatttttcagtaatgaagcaaatttaagaaaagcttcagtaatggcacatccagctcctggtacaatttctttatcaacaggtttaccaaatcctgaatgtttcccattaaagggtataacacttaatgttgaatcacctgaatcttcatttcaaaaatcaaatgaaattaaaagaaatataattgataatcctgatgaaattatttcatcttgtcaatatatggattcaaatggtttaaaatattttaatgaatgggttaaaaattatataattgataattttaaaccttgttatcaaaattgggattttataattcaatcaggtgcaactcaatctttagatgcattatttagaatgttaattaatccaattgaggatacaattttatgtgaatctttaacttattcttgtttccttgaaacttgtattccttttaaaattaatttattttcaattaaaatggatgaaaatggtattttaccagatgatttaaaccaattattaacaaattggtataataatgaaaatactaaaaaatttaaatttccaaaattattatatacaatgccaacaggtcataatccaactggtattacattatcaagtgaaagaagggaaaaattattagaaatttgtaatactcataatattttaattattgaagatgatccatattatcatttacaaattgatgatgataattcaaagcatattccttcattattaaaatttgatacagaaggtagagttattagaattgattcattttcaaaaatgttaatgccaggtttaagagtttcaattgttacttgtaataaattatttagggataaacttgcaaatcataatgaattatcaattcattcagcaagtgcatcatctcaattaattttacaaatgatatttaaagattggggtcatgatggttaccttaaatggcttgatcatttacaatcaatttatagaagaagaagaaatattatgcttgaagcttttgataaatatttaccacataaacttgttacttataatagaccaattcatggtatgtttatatggattaatattaaattaaatgaattcccaaaattaccaaattctaattattctgatagtgaatgggctacatttattgaagatcaaattcataaaattgcaagtgaaaaatataaagttatattaagtaaaggtcattggtttatgcatgataaatcattaattcaagctggtttccgtgcaacgtattcatattctgaagaagataatatgattaagggagcagaatcttttggtaatgcaattaatgatgtttattcatcattatattctaattaattttattcttcctttatactatattctctattctttactctattattctttattctctcttttacatacatattatagacttgctttatatctacaacaattgctatatttatacaattaaataccttaaattgctacctatataatttaagaaacgacatgcatataaatatcgcagaacggagttgatattttttactcggcataagtaggctatagtattaccaatgatattcaatttatgtctctttttacccttgccatttcactatattcttttataatttgcccacaatcgacaatgaagttctcatatacgacaatatggtcaattctatctgtattaaccctatcagttaatgcaaatgataatatttataaaccttatgataaaaaattatcatcagattcaatttttgaacaatttaatgataataattgggataaaagatggattacttcaaatcttgaaaaagatgatcaattagcttatattggtcaatgggatgttgatgaagcttatatattaaatggtattaaaggtgataaaggtttaattgctaaaactgatgcagcattgcatgcaattagttataaattaccaaaaattttcgataatacaaataatacattagttttacaatatgaagttaaatttcaaaaacctttagaatgtggtggtgcttatattaaattactaacaagtaatgataataatgattttattaatgaacaattttcagataaatctccttatgttatcatgtttggacccgataaatgtggtaatgataataaagttcattttattataaaacatttaaatgaaaaaactggtgaaattgaggaacatcaagttaaaatacctccaatggctagattagttcaaactacaactctttatacacttataattgatcaaaatgaagatttccaaattagaattaatggtgatattgtaagatctggtaatttattaagtaatgatgattttgatttattaccaccaaaggaaattattaatgaaaatgaaattaaacctgaagattgggttgaagaaaaatatattattgatgaaaatgatgaaaaaccaattgattgggatgaaaatgctccgtatttaattaatgatccatcagctataaaacctgaagattgggatgaaaatgaacctgaacagatacctgatccaaatgatttgaaacctgaagattgggatgatgaatatgatggtatttgggaacaaaaattaattgataatccaaattgtgaaaatcatggttgtggtaaatggtatataccaaaaattaaaaatccaaattataaaggtaaatggaaaccaagaatgattgataatccaaattataaaggtgaatggaaaccaagtttaattcctaatccaaattattatacaccttccaaaaaattatctgatttagaaaaaattggtgcaataggttttgaaatttggacaattaatgctgatattatgtttaataatatttatttaggtcattcaattgaagaagctgaagatattggtaattcaactttcttaccaaaattaagtgcagaacattcagaggcaattgcattagatcctaatgttgaaaaaccaaatacatttgattctaaatatttaactactccattagttaatgatatctacgaatatgctttggatgttatagctaaatttttatcagatttaactgattatgtacttgatgtctttgcagcaccaaatgaaactttaattcaaagaccaggtgaagcagttttcttctcatcaatcattattggtacttttgtctctgttgttggattttggtcattagtcattgcaactattaaagctatgataaattcttattttgaacctgagaaaactgcttatgttggaactacgaagaaagttgaaactgaaaaagttgaagtcattaaagagaagaaaggttcaaaagattccaaaattaatgttacagaagctaaaaaacgttaatattaataaattatacaaatttatacatgtctataaaatcattttaatcatttagtctctcctgtaaatgtgttgctcctcgtactatcatattccaaaagttaactttatcgcatcctttacatttacctttatgtggtagtatgtgtgtagttgttattgaagattctttatctaattctgcttcttgtttgagaaattcatcagataaacactttaaatgataaatagattcacaatcttttgtggtacaaacactcaaagtatactctgaatcatttacttcaatatcctgttcacagatcaaacactcacaatatcttttgagtttatcattatataatccccaacacttatccaaatactcattattatgtttatcattagattccataaactccttcagttgattataattaccacctttaataactgattcattatctaagtcctcggtatttgttttaacattaagttctaaataaattggtgtgaaaactgcgtatctattcttcaaccaaatttcataaatattttgattaaacaatgctacctttagtcctaaccttttaaaactttcagaattcagtaataatttacaattagcaactttactatgaatactagtaccactaccagtatgtttcttaccaggatttaatcttctatcaaatggtatatgacgcgtttgatatgcatgttgccatgcatgttcaaattgtaatgcacttatcttactgggaaattcataaacgtataatatcatcctccatggtctataacctttctttttagttctataagctccaccacgtgaaagttctccattatgttgtcttaatcttctacatggatcaggtgttgatccaacataaaagcaactctttttcgttactgaattaagtagatatactccatataatggtggtatgcttggtttcttctttccattcgattccacttgtgattctagttgtgattctaattgtgaacctatttgagattggtattgtgactccatttgcgattggtattgtgattccatcactgattcctgtgatgaatctgatatcaccatatttccagatgtttccacattactctcttgatttaccatttctatatgttaatcatccagttgaaccttgcttacttttagcaaaagaaaaaagaaataagaaataagaaaaacctgctttaacaaagtttcatgttacgcggagatcttcaatttcatgttcttttcctttgtttacatcttcttctttctttcttgaaaagtcttaaacttacaataacataggtctaaagcaccactgaagcaagaatggctcgtcccagtgcaatatacaggtcatctcaacaacaggcccaactgaacagagtaaaatataaattccccattcttgatccacaagaacttgtaatgctgtatgatacaatgggatttgatattgatgaatcaatgctgatgcgtccatcttcttcatttatgaaatcattgattgaacaaattatagacaaatttttatatatttcaccttattcattaagagagaaaatatccaatatggaaattgaaagtaataataataatgataataatactgatgatatgttaaatgaaagtgataagtattatgatatacgaccttcaattaatgttgttgcaagtcaaagaattatgtataaatttttatgtgattgtggaattgatgattttagtatacgggatgttgccaaacctgaacatacgagacttagaataatactaagcgctttgattaattatgctagatttagagaggaaagaatgggtgatttagatgaattgatggataataatgataaaacattagaaaattataaatcattgattaggaaaaatcatgaattagagagtcaaattgaaaagattaatattgcattgaataatcaaaattttacacttgatgaacttcataaaaataatgaagatttagagaatgagttaagaaatttaaggattatacagaaacaactaacagatgatcatgagaaatataaaagtgaaaaaacggggttgataaatgaattagagaatcaaagtgcattatatatagaaactgaaaaagatttagagcaaataaggccttatattaaagaatcacctgaaagtgtaaaagagttaatccaaaaaatgaaagattctgaagctaaggagacaaatgttttgagaaaattagaacaatctctaagagatatgaatatttcattggaatcatttcagatattaatacaagatttatctaatttacaaaaaactttacaagatttgaaaagtgaagcaataaggaataaatcatatgatgagaatttaagatcattgaaaagtcaaattaatcaaacaaaggaacaagcgaatgattataatagaaagatatcacaattagagagacaattaaaacataatgaagatagaattgctaaattaaaagtgttctatagtgaaaaaatgaaatctcttgatgaaaaattaacaaatcaagcaattgaattcaatgatgttaaatctcaaaaaaatgttgatgatatagaattaaccaaaaaggaagcacagatcaatgactggatgaataagatatccgatattcaaaaacaatatgaatttgaatgtaaagatgcaaattttgaatttgaaaaattgaattctaaaattcaaatgtatattggtgaacttaaaaataagattgacagtacaaaagacttgttgaatatgtgagagatgagagaaaacttaactgaattccttgtattatagttgtgtaaacttagatgtcataatataatgtataattaactaacttgaatagaaaaactgtaaacaatattctttagtatcaacatcccagtaatcccatgtcttatttgatattatactactagtattgggtattttaaatgcaatattctcataaggttcagcacttatcacaagatattgaaatgatgtatcattatccttaccacgactgaattctttatttgatacaaatttgtatgcaggagtgacatcactcttaattttatcaagttttagaacaaaaagtaatcctttctttgaagtttcttcatctctgatcttgattgccttatattgtggtttaccaatacttttccaataccttttcttaatatttttatcaatatttgaatcagacgttaaaccattttgtcttttctcaatttcagcacgacgcattaagttcaattgatgtcttcgtcctgttgtatgagtaatataattactctcagacatatgtgttgttaaacatagtttacattcaagtacacctaaatgattcttgaaaacatatggatcactatcaatattaatctttgattgtaaaagtgttttaagtctttctcttctatattgattggtttctgcagttccggcaattccacctgaaccttttttagatccaactctattttgataatccatttttcttgttagtttatcaaatgaaataaaaaaagaaagaagttgctaaacaagaagaagaggttaaagaaatgttttaaaaagtattttatcatgtaatttgtaaaaatgaaaaaagctatgaaggaagcgaggttcgaactcgcgcggacaatcgcccaacagatcttaagtctgccgccttagaccactcggccatccctccagttgttgtttttaaatactgatggtttgttctgttattgttgcaatgtggtcacgtgacaacaaaaattttaaaaaaactacgttttttcttaaaattggaagtttgttgaatttttttaaaaaataaatttgactaagaaagtaagtttaatgaaagagtgattattttagaattttattttacatagtttaaaaagtataatcaggataattaatcttccagaaaggatcattcaagagttcattcaaagagacaacctttttaacaactttgccatcttgaatatcataataaaagacatcttttacacccaatttgataagatagttcataacaaattgataattcaaaccaacttgatcatcaccatgagaatcatcacttaatacgaactttacattttttgaaatcatcagtttcataatatcatcctttggatatggagtatcccaaccttttcttatagcagaactatttaattccacagctaagtcatattcaataattagatcaattgattcattaattaatttccaaacttctggccaatcattttcaatatttatatttaatcgttgttctcttgatattttagtttttttatttgtttcgtcatcaatgatttcattattggcaaataatcttataaggtcaaaatgtgcaacaatttcaggttttaatttgttaatcatatttttaactaatgtaaaatattctttatataatccttgtaaaccattatatttattaaatgcaatattccaagtttcttgatcaaagtcaatatcaataccattaacatgatgaacacttccaacaatgacttctgcattgatatcttttcttaatttcaaacacatatctaaatgttcatcatttataccaccttcactttcaaatccaacaagtatttttgtattgatattactatcattattaactttttcctgtaattgtcttgcgtgtttaacatattcattaaattgaaccattaatgaattaggggtcatatcaagctctttctcctctggataaatgtatgcatcatctaatcttggaacatgttcagttaaacaaaatattttgaaatttttcttaattgcagtatttacaacagaatctaaggtatcatgtgcatgtttacaataactacctgaatgtgaatgatgtgtatatggcataatactgttctatacggttatatacaagcaattttataaacagataaagataaaagatggtgaaaagattataataaagaaaaaccccacggaattactcaccaaccgtatttacgtagcttatctcttctttccttctcttgacgttcagctttccatttcaggaacatagcccacaggaaaccaacccacataccacctaaatgtgcagcataatcaaaactaccccatctaagtaaacaacctgcaacattatataatgcaaataaaccagctgcaactgctgcaccacctggaactggtatgaaaaagaatgaaatacctgcatttggtacaaaagttgcaaaagctgtgaaaacacctgcaattgaacctgatgcacctaatgatctaccaaaataacggaaaatttgggaatatgcaagtgaaaaaaatgatgcccaaacacctgaaattaaatataaacttgtaaatccactaattccaagaattgaaatcattgtacctgagaatgaatatagacaacccatattaactaaaagatggaaaggttcttgatgtgaaaatgatgagaaaatcattgataaattagatttacgtgttaatgctgatctatccataataaaataattctctaatgttttgtaaagtaaagtatttgaataacgaatttgccataaaccgaaaacaattgcatttaaacctaaaatagtccatattaaatgttgtggatgtttattaaaatatgacattggagtatatttgaaaatatatggagtggcaaaatatgttacaattgtaaataatgtaacaaatataaatggtttaataatattattttcagtattattataatttggatgttgataaccactatttcctctatttcttccaagatcacgaaatgtagctaatctcttaaagacaaaaggttttaacttgtttgtgattgtagatttcataaaagaattcttgatagtattatcagtagttgacttttgccattgtgaaaaaaatgcttttgatgttaataatgaaggtcttgttaaattagcaggtttcaccagggatctccaaacggagacaccacctaaacgagcagtagtgacaccaatacgaaacattgtcgactagatagggagagttaacaagttaaaagatgaaaagaagataaaggaagttgaaagaaaagaaatttataactcggaactgtataaatagtcaaaatttatatagctaactgtaatgttgaatgcttttccttagaaagtgaagtaattgtaagggaatttacctgtttgaatgctgccattaacagtcatgaatcctgtccaccaccctgaagggtcttctttaactacatgaacaatatcaccctttttgaatgataaatcacctaaattatcagatttgtaagtatacaatgccgttccagtcttttcatgttgaacattaacatttttattgatattggtatttgaactgctattcatattataaaggttattgctgcgagttgaataactcattatttcaagtgactctattctattattcaaatctttatgaatattcatcacttttcttgattcattatcaaaatataagttattgaacactatatcaggatgagatttctgtaaaatggagaaatgtgtgttaataagtccaaatatttccaaactgttaaagaacaataatgttgaaatagacttaaccaatgcattgtttaaatttaaaaaatttggtaaatctacatcaagcatatcatcaagatacttacatttctttatcgattcatttaatttgttttctacatcaatttttttctttaaattgttatttccattttgcaacttcttgaattcagaactatagaaattatagtctaattgaacaaactctctctctttcataaaattacttaatgatttcaatatcttatcaaggttcctaaacaattcatcgaatttaagtttgaaattggacatactctccttaacactctgttcaatattggttacaataccactgacattatttttctctaattccaagatattttcgaattgaataaccatatttaacagatgtttaacataatcacaaacagatgtattatattgagagaaatatttctgtaaatcattatattgtttgattatttcacgtgtatgtttgattctagacattgttaaatcattatcactgttagatttacccaagaactcatcatattgatgttttattaattgaggtgcctatacaaaatctaattgttagtatacatattatttcaagtaatgatattctattttacatactctagtaacagaattagtgatatcactccatgatatatccggtatcctaatactatccattcttgcaatgctatagtttggtatataataaaggtacgtggtataacatctaaagataaaattctattattgccctatttaatcaacttttttaaatggatgactggcatcgacaccgggccaagctgatattctctgtttaccatcatctgatccatctgattgatgtagatcgtgattattagtgttctgtatatttgttaggatttgtaattgtgaagttgaattgaaaacaggttttaatgaattaattttatcaattattaaattatctaattgatttattaaatttagggagaaatgtttatcaattggtttattgtttaatatagatactttaagcttctttacaagattaataaacttaatagattctgtgaaaactgattcattttgattacttgtaccaatatttgtattatgttttaaaatcagtaatgcagcataatataacattatatgaatatgaactggaacatatttcaaattattcaatatatcatgatcattaacgactagattaagaatggtttcagctgcagataatgcaactctatgactttgttgtggagaaagtgttgcaatatcatcttcatcattgcttgaactgtggtcctcatcataatcctctccctcctcctcctcctcatcatcatcttcctcttcattgtctttgttatctttattgtcaatatgattagcagttttattctcatcatttcctatttcattctctaatgcatcatcactttcttcattagataaatcatttaatgaaggtaaattatttaaattatcgaaatttctaattgagaatgaattgatatacattttagcaaaattataataaattagagttgattttgatgaccaaattggtatatttttaaaaggatttaataaaattgtccattgaaccatccatttatctaattgtaaattagttttaaatggtaaaccaaatttatttggtgataataaatcccatccattacctgagaaagccgcattaattgcatgatgatattctaattgtgataataatctaatatccataggtaatgggatatcatttgattcatcaatttctttttcctcaatttgttccttttcctttaatgataataatttttttgaatttaaaatagttgaatcatcattattaaataatgtatttgtattgaaaactaatgattgttgactatctaaaatatataataaataccataattttaaacgatcaaattttgaaatatttttaaatttattagattttaataaattaaaagaatttgcaatttgtaatgctaaacctgtaaataattgattatttttaaaccaaaatccacataagactaatgcaattattgtattaaaagcttgtaaatgattattaggatatgaatataataatttatttgaaattttataaattaacaattctaatgatgatgataaatgatttaaatttgggtgatgaattgatgcaatacatgaaatagttacaaccaatagaggacatgaattccatattaaatcaaaagaatattttgatatatcaaaaccaaataattgaggtgaaattttttgattaaagaatacaaataattgtttagcatttttgtatgatgggaatgaaggatctttttgataatcagttgaagtttttgaagtggatgttgaatctgtattattaaaatttagatttggatttgaaattgataaaatatcaatatttgaacttgattttgtatttgtattttcatttatgtttgaagataatttcagtaatgattgacctaaatcatttatctttgattttttaattgataattgcgaatcatttgtatttgtagttgaattaattttatcaattaatgaaactaattgatcacctaatccatctaatctttgttcaatagatgatttccattttgatgattgtggttgtagctgtggttgtgattgtgattgtgattgtgattgttcaataggttgagataatgaatcagatttaagtggtgatgatactgcaggtaatgaaggagttattattgaatttgaggatggtaaagtttcatctaattgacgttttttaaaagcagaagtataagttttcactttatattcataaacacattctaaaccatgaagtacacatctattacatggagttgtagttaaatttaattcagaagttgaagattttaaacatttaactttagctttcctacaattcaaacaagctttacttctcttcttattattggtattagtattattattagtattatcagttatatcatttttagtcatactaatagggtatttattgggtatattattatcgatacagaaagaagtagaagattaaaatcaagataaaaataataaaaaaataatttttgaaattttgaaatttgtgattttcacgccataatagtaaaatggctatggaatcaataataatgaatgtgtgtacttaaatgaatagcaaagattagtaatatatcatagtatcaaatactataatgatctaagagtatttctaatagaatgaattgaatgattaagaccattctgttgatgattgatatattgagatgattgaattgaccaattttcaacatttgcaaaatgagttgttgaacgtacggaatccattctaattgcagcttccatccacattgatctacgagcatctaattgttctaatttaatcattatatttgagacatcactttgataacgattatgagcaaaatctaatgaatctgataatgattgccaatcatattgcaataattcattgttagagctagtggtagtggtagatgcactactattacttgtattagtattagtagtaatattaggattagaattagtagtaatattaggattagaattagtagtaatattaggattagaattagtattggaattattatttaaattaaatgaatattgttgttttggtaatggcattggaggctcattagctaattgtaaatcagctctttcatgtaatgttaaaggttgagatgagattgaatcttttataattggagattcttcaataggtgagagttgatctctatctctatctctaagaggagatgttgttgaaggtacagcattaacagaggaggatggctcagatgtagtatttaaagacattgtattgtaagtggaggctcagcagagtggaatggaaaaaaatagtttaatgagaatataattgattaaattaagataaatagacgctattaaaacactacaaaagggagtgtgggtgaatgttagtaagtgaacatagtaatagaagtacaagtacagtatccagtggttgtaatataccttataagagcagtagtgaaagaaggtaagaagcaaagaagcagagaagcagagagaaggcaaaaaccctattatttattaagccgcgactttatttgaaattaattaattaatttaatacgaggaaatggaaaatggacgattttattaaaggacaacgttttctgttttattagagtgtactttcttttaggtttttcttttgattctattttatttcctctcttttatcatacaagtattacaatgtctaacactgaaagaacttttattgcagttaaaccagatggtgtccaaagaggtgtcttcccagaagttttaagaagattttctcaaaaaggttttaaattagttggtattaaattaactaatgcaaaggaagaattattaagagaacattatgctgatttacaatcaaaacctttcttcccatctcttttatcttatatgatgtctggtccagttttagcaactgtttgggaaggtaaagatgttgttaaacaaggtagagttttattaggtgcaactaatccacttcaatcagctcctggtactattagaggtgatttcgctttagatatgggtagaaatattattcatggttctgattcagttgaaaatgctgaaaaggaaattgctctttggttcaaaaaggaagaattagtcgattataaggctgaaatgtacggttggatctacgagtaagtatgatgtatatattgtaactatataacatattatatattatatttatatcactctaatgaagttatttatctcctaaccctctagtaactaataactaataactaataattaatataaaatttctcgacgaaaaaaatcatttttttccagtttttgacactttgactaagattttggtgtttttgctaacatctattggtggtttaaacctctttctttttctttttgtagttttatttatttgtttctttaaactttctctcatttatcattctcatttaataatgtcagactctgctaaagtaccacagttcttttgtcgtcaaccaaaatcagtttctctattccaagctgaacctttatttagagatttaccaaattttgtaccaccaaatggtaatgaacaaactcgttgtgctcaatatgtttcaaatggtaatgcattcttatatactttaccaaatttaattcaattagttgatacaattacaggtttaaatttatttgaaattaatatacctgacgttttcgaattagatatttcaccaaatggtaattatattacaacttggtcaaaattaattaaagatcctgaaaatgataataattatttaaaaaatgttaatataatttatattgatttaataaataaaaattataaaattatacattcattccttaataaatcaaaaacaaattggatacctcaatttactgctgatgaatcaattatttgcttttataaaaatccttattcattaaatttttttaaaattagtccaaatattgaaattgatttatcaaaaccttttaattcattagatttaaaaaattttggtaaaattgaagattttaaattatctcaaggtaaaaatccttcaattgcaatttttatacctgcaaataatggtaatcctgcatttataaaagttttctcattattaaatttaaaatcaacagtttcagaaaaacaatttttcaaaggtgaatcatgtatatttaaatggaattcattaggtacttcattattagcattagttacaactgatgttgatgcatcaaataaaagttattatggtgaatcacaactttatttattagatatttcaggtttatttgttcaaaaaattaatttacctcatgaaggtccaattcatgaatgtacttggtcaccaacttcaagagaatttgctgttatttatggttttatgcctgcaactacaacatttttcgattcacgtggtaattcaattcattcattaccaaaaaattcaagaaatacaattttatattcacctcatgcaaaatatattttagttgcaggttttggtaatttacctggtgatattgatatattagatagacaaaataaatttaatgttattaaatcttttaaagcatcaaatacaagtgtttgtaaatggtcaccagatggtagattcattttaactgcaactacaagtccaagattaagagttgataattcagttaaaatttggtattttaatggttcattagtttattataaaagttttgaagaattatttaatattgattggagaaatcaaccattaaatgatttcccaccaattacagtttcaaaagctgataaattagattgtgaacctcatcaatctgcaattgattatttatcaaaatttaaaaaaaatgattcagttaaaaaaactggtgcttatagaccaccacatgcaagattatcaggttcaagtaatattgtatcaggtagatcattagctgacttacatgaacaaaagcaaaatggttattcaaataaatcaacaatgtcatcaattccaggttatgcacctaaaattccaactaataatgtaattccaggttattcaccagttgaaagtaaatctgcaattaaaaatcgtagaaaacgtgcaaataaaaaggaagctggggaaggaggagaaaccactgcatcaacatcaacatcaacatcaacatctccacaaccacaatcacaatcacaatcacaatctaataatgcatcagatttagttattggaggtgttgtatcattagaagaaaagaaaattcgtaatttattaaagaaattacgtgcaattgaaatacttaaacaaaaagatgcaaattttgaacatcttgaagatactcaaaaacttaaaattcaaactgagggagcagttcgtgaagaacttaaatcacttggatggaatggtgtcttataagttattctctagatctatataaataaactctatactactatcataatcattaaatacattataaatcttacataatcaacagtaagcgacgatgcgactgtcccaatataaatttttaaaaatttgtaaaaatttagccaatgagattcatccactgtgaagaaaatttcgcggttttacctaagtgttgaaattggacattttgttaatatgaaattgaatgtgtagtttacagcttgaagagtagagtaagatttatttgatttaactttattttaacattcaactaataacccaaatatgtatagaatcggtgcacaacaaattgctcgtgtttcatctgctaaggcaagaaactatgcaactttaagagaaattgaaatgagattaaaatctattaaaaatattgaaaaaattactaaaactatgaaaattgttgcttcaactagattaggtaaagctcaaaaggcaatgacaagttcaagagtttatcaagaatctgatttagattttttcaaaattgctgaaactcaacttcctgaaggttcagatagaactttaattattgcaattacttctgataaaggtttatgtggttcaattcattcacaaatgggtaaaaaagttagatcaacaattgcagaatatccaaatgctgatattgcagcaattggtgataaaactaaagttcaagttttaagaagtaatgcagataaattagttatggcatttaatggtgttggtaaagaaactccatcatttaatgaagcttcattaattgttgatgaattagttaaattaggtacttatgataaagttgttgttttatacaataaatttacttcatctgtctcatttgatccatcagcagctgaaatttattctgaagctgcaattgatgcttcatcaaaattagctgttttcgatattgaagatgataatggaacaactgaaactttagctagaattgctttaactaatgcaattttcgctggtatggcagaaggttatgcatctgaaatttctgcaagaagaaatgccatggataatgcttcaaagaatgcaggtgatatgattaataaatactctatcttatataacagaactagacaagctgttattactaatgaattagttgatattattactggtgcttcatcattagattaattgtgttgattttaatgaaaatttaaaacacaatgaaaaactataaaaaaaccaaaataatacaatattttcaactttcctctttactttaatgacttgattcgaagtataaatactctatctatatttatttattcaatatatctatttatttacatattattattacaattgtaattgtactgtattagttgtaatgtagacttatagttgtagtcattacgtaaagacatgcttatcatgccacccggagctatattaatattaacccacacagggaaataattgttccagaaaaagctaatttttcatgcgctggtcattatttatttccgggccatattcaccccccctaagatgatcgatggtatttcaagtataaaagaggagcaatcgtacaacttatttgatattttgatgattaaactcaattgatctctaatattattaatttcttttcccttaaccaaaaagaaatacttttataagtattagaatattatatacacaaattacacacacacaatgtccttagcaaataaattatcagttaaagatcttaccgttgcaggtaagagagtcttcgttagagttgattttaatgtcccattagatggtgataaaattactaataatcaaagaattgttgctgctttaccaacaattgaatatgttttatctcaaaagccaaaatatgttgtcttagcatctcatttaggtagaccaaatggtgaagctcaagcaaaatattctcttaaaccagttgctttagaattagaaaaattattaaataaaaaagttcttttcttaaatgattgtgttggtccagaagttgaaaaagcatgtgcagaatctgaagaaggttcaatcattcttttagaaaatttaagatttcatattgaagaagaaggttcaaagaaaaatgctgatggtaaaaaagttaaagctgataaggcagatgttgaaaaattcagacaaggtttaactaaattagctgatgtttacgttaatgatgcattcggtaccgctcatagagctcattcatcaatggttggttttgaattagatcaaagagctgcaggtttccttatggctaaagaattagaatatttctcaaaagctttagaaaatcctgttagaccattcttagcaattttaggtggtgctaaagttagtgataaaatcttacttattgataatttattagataaagttgatatgttaattattggtggtggtatggctttcacttttaataaagttattaatggtgcaagtattggtaattcattatttgataaagaaggttctgaaattgttccaaaattaatggaaaaggcaaagaaaaataatgttaaagtctttttaccagttgattatgttactggtgataaattctcagctgatgcaactgttggtactgcaactgcagaatcaggtattgctgatggtttaatgggtttagatgttggtccaaaatcaaatgaagaatttactgcagcaattgcagaagcaaagacaattgtttggaatggtcctccaggtgtctttgaatttgaaaatttctcaaagggtacaaaggaaatgttagatgcttgtgttaaatcttgtgcaaatggtaataccgttattattggtggtggtgataccgcaactgttgcaaagaaattcggtgctgctgataaattatctcatgtctcaactggtggtggtgcttctcttgaattattggaaggtaaagaattacctggtgttactttcttatccaataaagcttaattttgtttaatgattactattttacttctatctttttgtttaattgattcacactatacgattttttaatatatccttttatgaaaaaaaaacagtaataatatcataatccagttaaatactattacacatcttataaagaatctttatctttcgacttctctttaccacattgtgtacaaaatactaaagcaattttactacttaatgcttcaccaacttttcttgctcccgtctcctgtatggtagcagctttaatcaatgtacgacaattaccttttaaatgtgctttttcatattcttcaaataattcacgaggagttttatatttacctgaaataactgccgctttatccattccaatacctcttatacacattaatattttagcaaattgcgatttaactcttaattctgaacttttacctaatcttgatgcaaatgtattataactataaacaacttctttatcagaatgtgtagtttgcattgcatttaaaattttagcatatccaccttgaacattcatcatatcaccataatttctaggttctaataccagtaatgtagtttttttgtgtatattagttataattttatgtaatgattcaataagtttcaatgtagaatctgaatttctagttcttttaactcgaaatcctgaatatgttgttgccattgacattgcagttttaattgattccatggattgtgacatttctcctgtatttatttgttcctcaactatataataaatatttttcataccagttttctctaatcgactcttttgttctctatatctaccatctttaattgaaccaactaaatcatctaacctttttctttcaaatatataattcaatgtagtttcttgtccagactttttgttgacggctatccataatccatctccaacaggtaatgatcttacttcaacatcaatacctctagcttttaaggtttcaccgaaaaccgctctatcttgttttgagaaaatttcacgattatcaagcaaaaactttatcttataagtacctggtttccaaacttgatattctgatttatgtgatgtattattatgcaaatgtgtttcacttcttagaggagatgataccatcaaattattattatcctttttatgtttaagtacatctagtgatcccccacgtaatggacttgaagaaaaggcaatacttctgctgacatttggcgagctactagctaatggattcttatctttttccttttccttaattatactactactgagtctagcattttccttttcattcattttccgatttgatcgaggtgtactatttacactactagtatttacagcaattgaagatggattagcattttccatttcatttaatactttagcaacctctctcccctcttcagttaatgaatagtattcaggtctaccttcagcaaccacatattcattttttatcaatgttttcatactactgaatgcattataaaatctccccgtactggcattattttgaaatgaagatgtacaataatttaccccaaatttggttatttcactttttgtcatacctgtaccatgtttatcatgaagaaataatacaagcagtatagcgtaacctcctgaattaacttgtggtacataccttttctttgtagtctttttcttcttagatgcagctgtgtcatcagatgaatctaatgaacgtttagctgcctcttttccctgtttctctacttctttagctttcctattcttattcttgttcttcaatcgttcctctttttccttctgtattctttccttttctttcatttcttcaggtatatcgggataaggtaatgaatattcttcacaatattcctctaatcgtaattgcatcattttaaccaatttatcaccaaagaatttcacatccattaattgtgcaggatgcttaattgtcattggacaagtttttaaacttttcattgcattaccgtaagtatgagccatcttactctgcatttgtaatttaatgctatattctgcttgaatccatgttaaaaaaagatgttttaaatcttccggcagctgcatatgttattccactttgaatcgtcgtaattgttgatatatagatgataatataaatctttcattaagaagtttatggatgaagtttaacgtttaaaaaatgtcaacatgaatattgttgattttaattttaaggaacgccaaaatcgcccaattaggaaggtgctatttttttttttgatctttaaattagtaaattatacacaaatgatatgaagaaatgatattgaaaacagtaagaataataagaaacatatgggattatttatatatacatgtacagggcattagatttatctgcgtggtttgaaagtagcttcttgaggttgatcattagaatgtgcagcttgtttccaaggatcttcagcaagtgaagatgcgtcggtttcaagttttgcattatttttactttttatttccagatgagataagttattcaaatcataaccagatttttgcattgcaatagcggcattttctgcagttgattgattctctctatcgtttttattttgaattttccctaattctctatttaaattttcttcaattctttgttgatgtaattccttattatacagttgttcaccttctttaaattgagacattatttgtaatttccttacacgttcttcatcttgtaatatatcgaaaattgaaggtggagtttttcttgaaaattttaaccattgagcccattgaattggaactttatcaaaataattaaatataagtttttgaggttcataaggttcaaccattcgacgaggtcttaaatgtttaccatcttggaaatattcccaataagtatttgcatctaaatcataaccaacgaaaaatttctttcttaatggaactcccttaagtcctctccatttataatatagttgtttccaaacagagacacgagaataaaactccttgagcttttgcgcagttgcaggggatgacataacgatgaccaataggagaaagcaattggatatgcatgcaatgtgcattgtgagaaccttccagagaagaacttagtaataaaatttatccacagtggcccgaaaaggcaggtgtgccgagggatggattttttacgtgtttaagtttaagatttgagtctactaagcctttgaaacctttgaaacggttctttctcttggaacttgtttcatctttttattttatatattctctgttcttttctttatttctacaagtaaggtagagtttttggtgatctggtacggaaggcactggtagtagtacattaataacttttttaacattcttacatatcacttttttcacaattgaaaaagataaaaaataaccatttaaggtttacagggatagacgagagatatttcatttcattttatctttattttatctttattttatctttattttatcataattccaactcatttctagtattaccagtgtcattagaaaccagacgtaaaagtaaatcagataagacattgttttgatcaaacctttttatagaattcattagcattagcatcaaaaagcatagcacatagcatagcacatagcatagcatagcacatagcatagcatatcattttttagcatagcatagcaatatttatacaaacatcataccaacagcatttccaataccacattaatacctaattgaacaatatattacactatgctaactaatatatcaaacattttatttccaattatccttctatggattaattttgcattttcacataaattcatcgacgaacaacaacaacatcataatcaattaactaattcaacattatacacactttgtcgaaattctgatctctatgaattattagacacaattgttaattatgaagctagatttaatcataaatttcattatgattgggttttcttaaatgatttaccatttgatgaagaatttaaattattagtttcaaatgcagtttcaggtactgctaaatttggattaatatctgaagaaatgtggtcaattccacaaacagttgatttcaaattaatgcatgaaaatatggaaaaagcattaaatgaccctgaaggggtatatccatatgcagattctaaaagttatagaaatatgtgtagatttgaatcgggatttttccaatggcatgaaattttattagattatgattatttttggagagttgaacctggtgttaaattacattgtgatattaattatgatattttcaaatatttaattgataatgaaattgattatggatttacaatttcaatgttagaatatcctaaaactattccatcattatttcaatcatttattcaatcactggatgatttaaaaatgtcaactttattaacatcaactgaaaattattcaaaatttattttcaatatggataatagtgattataatttatgtcatttttggacaaattttgaaattggtaatttaaatacatttagaagtgatgagtataatttaattttcaaagaattggataaatataatggattttattatgaaagatggggtgatgcaccaattcgtacattgatattatcaacaattttaaaataccctaaaattcaaagattgaaaaatattggttatgaacatgcacaatatcttcaatgtccattagatttagagactcgagttcaaaatagatgttcctgtgatattgatttagatataacttatgaatatgtaagttgttcctggttctttgatgaaatagttgaagaactgaagcaacaaaataaattatctaatcttttatagaagtgaaaaataattttccaaataagtatagtagtagtagcggcgataaagaaatttttcaaattgatccactccgagacgtttctttttctttttggtactgtaaggaagtaagtaatgaaaacaacttctgagaagagacagacatctatactggattttagttttcaaaggaataaaagagtgaaaaatgaagtgaaggtagacgtacaggaaggggaagataataaaataacagagatagaaatagagataaaacaagaaacattttcgtgtcccatatgtgaatttgatctcactaaatttcatacagatgctagatcagtacatattaatcgatgtattgatattccagttaaatcgccatatgtttatgaatctccgaagaaggaaattaagaaggaagtgaagaagaagaaatcaaccacagttaaacgtaaaagaaacaccaaagttaaatcagagatagaaacgaaggcggagatagagattaaaactgaaaatcaaatagaaattttagaacaaatacaaccacaaccacaaccacaaccacaacctaaaaaacgtcgaggtaaaccgaaaccacctatacctgatatgaaaatacttgatttccaatcaaaacctgaagatatcatagcagttgatgcattttgcttttgtatgaatgacagaatatcagtttacttactaacacatttccattctgatcattatggcgggatttgtaaatcgtgggataatgggaaattaattgtatgcacattaattacggggaagctattaaaacttagatataaaataccggatgaaagattatttatgattgaaaattatggagttgaacatcaaataccggatactaatataaaaattacagcatatgatgcaaatcattgtccaggtgcaggtatatttgttttagaatgtaatggtttaagatatttacattgtggagatttccgagcaaataaaaagatgattgatatattaaaggagagatatccaagtggatttaataaatgttatttggataccacttatgataatcctaaatatattttcccaccacaggaattagttataaatacaacaagtggatttatacgtgataaatgtattacatataaggctaaacagagtagaatattagaatttttcactaacagtaagggtaataatgctgctaaacaatttttaattatcgttggtacgtattctattggtaaagaaagacttgcacttggtattgctgaagcattagatacgggtatttattgcactccagagaaaaaatcaattatggagacatttggttgggaatcattatctaaaagaatagtaagtgatgaatataaggcacatgaatgttcagttcatttagttgctatcagtaaaacaaggaaagattcaatgaaggaatacttacagaaatattcatcacattttaaatctgctatagttatcagacctacaggatggacatttgggtatacattaccaacagatacattaagggattcattggaacgagggtttcaacatacgagtgctgatgagaaaggtcaatcaggggtaggtgtaattcatagagtacctgtcccatacagtgaacactcatcctacgaggaactcaccatgttccgtacggagatggcagttaaagagtggataaataccgtatagaggacgatgcgacggtgggaaaattttcgccattggaaagttttggaacatgacaattacaaaatgtttaatggcaaatttataatttttataatctgtaaataattacatttagttgtttctttactgattttactttgtgacaagtcacatttcagctgttgttattgctgggttgcgtcgttgaacttttgtacatttttttttcactcttaaattactttgaaatttgtctatattaaaagctcatatccgcaaatttattatatttcatattaggataaaagcttaattaaagataattataaataaaatataaatatagaaacaaatatatcaatatacttgaatatttatccaactacaacacagttttaaaacctcatttatacatcacataacataacataatactataaattacaatggatatttcaaatttattagaaagtgcaattttaagtactgatacttcagtcagacaaaatgctgaacaacaattacaaaaattatgtgaagaaaattggattcaatatattggattattaattcaagttttaggtaatgaatctgctaaaactgaaattagaatgttggcaggtcttaatgttaaaaatcaattgacttcaaaagatcaatcaaaacgttctcaacaagttgaaagatggattcaacttgataatgaaactaaatctcatattaaatcaattactcttaatactttattatcatcagatgaaagagttgcaaatcaagctgcaactttagttgctgcaattgcagaaattgaattaccaagatctgaatggaatgatttaattgatataattgttgaaaatactaaacctgaaaaacctgttaatgttaaaagagcttcattattaacaattggttatatttgtgaagctgttgatccttcaagtcctgttgttcaaagttattcaaacggtattttaattgcaattgttcaaggtgctcaacaaaatgaagaatctttaattgttagaaaaactgctcttaatgcacttattaattcattagaatttattgaatcaaattttcaaagagaaggtgaaagaaattatataatgcaagttgtatgtgaagcaacaacttcaagtgattctgaattacaagctttagcatttggtgcattagctaaaattatgagtttatattatgattatatgtcagtttatatggaaaaagcattatataatttaacagttcaaggtatgagatcatctgatgatagagtttcatgtatggcagttgaattttggagtacagtttgtgaagaagaaattgatatacaattaaataaagattcaaatgaagattttatttcatataattttgcattaattgcaattaataatgttttaccagttttattagaattattaacaaaacaaaatgatgattttgaggatgatacttggactgtttcaatggcagcagctgcatgtttacaattatttgcacaaaatactggtaattatgttgttcaaccaactttacaatttgttgaagcaaatttaccttcagataattggagaaatagagaagcagcagttatggcatttggttcaattttagatggtccatataaaactgaattaaaatctttaattactcaagctttaccaccaattgttcaattaattaaagatgaaaatttacaagttaaggaaactgtttcatggtgtttaggtagaattgctgaattagttgttgatgcaattgatattaattcaatgttaccagaaattatgaaatctttaattgatggtttacatgatcatccaaaaattgcaactaattgttgttggacattaattaatttaactgaacaactatcaaataatgaagaatcaggttcaccaaatattatttcattatatttgaatttaattataccaccattagttgaattatcagctaaagatgataatgaatattcatcaagaacttcagcatatgaaacattatcaacaattgtattaaatagttctgataacgattatccaatgattgaatcaattgcaactgaaacaatgaatagattagatcatgtaattaatattcaaataaaatcacaaaagggtgaaattaatttttcaagtgaagataaagcattattagaagaattagaatcaaatatcctatcattattaacaaatataattagaagattagattctaatataaataatgtttcagatatgttaatgtccaaattattagaattattacaaattcaatcaaatgattcaatcattgaagatgatatttttattgctatctctgcaattgcaagtgcaatcaataaaaattttgaaaaatatatgtccttatttttaccatttttaacaaaagcattagaaaatgttgattcaacagtttgtaattcagcaattggattagttgttgatatttcacattcattaggtgattcattcataccatattgtcaaggatttatgtcaattttaggtaatataataacaaatattgatacacgtcgtgaattaaaaccattaattttatcatgttttggagatattgcatcatcaattggaattgaatttattcaatatttagatgttgtaatgaatgtttgtttaagtgcacaaagtattgaacctgaagatgattcaattgaaactgaagattttattttatcattacaatcatcagttttagatacttatgttggtataattacaggattacatgatcaaccacaagcaattattaattatttaccacaaattttcacatttttaacattaatttatggtaattcatcattatataataatgattcagtttatagagcatcagttggattaattggtgatattgcacaaattttcagtaattcacatattgaatatttcaaacaaggttgggttacagaatttttaaagaaggcaaagaataatccagaatattcacaaagtacaagagatacagcaaaatgggctagagaccaacaaaaaattttattatcaagattataatttcattttaattaattaattattcaattattcaatttccaaataaaaataattttaatacatcttactttattccatttaattccattttacatgaaacataacatataacaggcaacattgcatctacgaatttagtatattatacattacttttgaaacttttataaattttacctttttatacaacttttttacttctcttattatattctcttctcttctcttctcttctcttttattattattatattttctactatcttttaatactttttaaaaatctcctcctctctctttaactttactaaatttactattaattttaatcccttatattatgaatattatacctttaacttttctatatctttcaattaatgtacccatctccttctgtattttttcatataactatataataacaatttttgtttttataaataaattttaaacaatagatttaaattgcgtagcttaaagtggataattaatattccgcactcggagattgtcactctctgcacagtttacttcaggtttatctataaatagtgatgaatgtctgtacttttgacagttgatgtttacaatatctctgagagacaaagatgtcagcattttctgcaaatacattcaattcacatgattattcattatatagaccaagttattcaactgaatttttccaatatattttccaatatttaggtttaaatgaatggaaaagtgaaagtattaatatcttagatgttggttcaggtccaggtacttgtattgtaaagataattccaattctcaaagaggttattaataataaagaaacaccattaaaaaaggttaagatatttgttagtgatttatcaaatactatgcttaatgaagcaaagattgatattgataaagttatcagagattctttagaatcttttgaaattgagtatattcaaagtggtggagagacaattgatttgaaaattaatgaacaaattgatttaataattgcagcagaatgtgttcattggttaaatagtgaaaaatggcttgattgtatgcataaattactcaaaaaggatggagttttagcatattggggatatgttgatccagttttcactaaaattgaaggtagtgatgataagaatagacttaagattgcaaatgatgaatataattcatttgtttatgaggaaaagggtaaattgggagaatattggcaacaaccaggtcgtagtaaattacgtgcattatataaggaagtcaatgagattgctttgaataatgaaggtgataagtggtatgaaaccattatgtgtcgtagagatccattaattggagaaattgaaacaattttcaataatgatggtaatagtgatggagataatggaaaagtttcaagatttgaatttaaggatgatgttttaaagatggagatgaggttaacatttgaacagttattgaattatatggatacatggagttcatcatttaaatggaattcaagtcatgaagaaaaggttagtttattatttggtaagaaattagaagagaaagttggattaaagaagagtgatgatatagttattgaaatgaagacagtttatttatttacaaagaaagtatgattctttgaagaaagatatatgcatatatacttagtttttcataatattttcaaaattttatagttaataatataaaatactaaaaggaaatatagttttaaaagatatacacatcatataatttattaattaattataaaatttattcagctttaccaccctttcttgcaattaaagcttttctatctttatctaaatgtaatttagtaataacaacttttgaaggatgaatatttaaaggaactgaagcaccatttgatttttcctttgttaatttttcgagttgaacagcaaattttaatctataaacagaagaaattgaaccttcttgacctttctttgaacctctaacaattaaaacttgatcatcttttctaattggcattgatttaacaccatattcttctcttaattcttttgaaagaggagctgacattaaaactcttctaacagaagatggagcattaaaataagcctttcttgacttagatcttgatgatgaaacgtcctttgaaaccttagccattgtatatattgaactttagttgttactgaagggaaagtaaaattaaattaatgtcttaaatgaaataataatttttcagtaaaaaattcaataaaattcaataaaatggaaattttggaaatccatagtaaaagtcagatagtatcacagctaagagaatattttaccatactattactatatcacatagtaaaaatttctacttcactaactaagttactatttttcctattgtcgcgggtaacttttctgattacctaataattttttatttttttcagtgcgtctcttttttctcttttttggtttttgtcagtggtgtgaggagtgggtgagggtttgacttgttggataataaccctgttgcatgtcatgtgacagtgccagacgcgtctatgatttaaaaaaattttcaaatttcctttttctaagatcctaaacatttacgcgtcagtgtctcatacttcccttaactccagtatgatagaataaaaatttactaagtaaatcaattttgccactattacgcgtaatttttatctgtatttcttagtaattaaatctattttgaacattttattagaaaaacacgtatatccccccctattttcactttttgttattatcttcttttcttttctttattctcttttcctttccttttttcattatacaatccccatctttcaaatatgaacgttattaaaagagatggtcgtagagttccagttcaatttgataaaatttcttcaagattagaaaaattagcttatggtttagatacaaaacatgttcatccaagtgcaattactcaaaaaattatttctggtgtctatgatggtgttacaactgttgaattagataatttagctgctgaaactgctgcttatatgacaactgttcatcctgattatgcaactttagctgctagagttgctatctcaaatttacaaaagcaaacaactaaaaaatttagtcaagttattgataaattatataaatatattgatccgaaaaataataaaccttctccaatgatttcaactgaaacttgggaaattgttcaaaaacatgcagaagttttagataatgcaattcattatgatagagattttagttataattatttcggttttaaaactttagaaagaagttatttattaagattagatggtaaaattgttgaaagacctcaacatttaattatgagagttgcagttggtattcatggtgaagatattgatgctgcaattgaaacttataatttaatgtcaaaaagatatttcactcatgcaagtccaactttatttaatgctggtacccctagaaatcaaatgtcttcatgtttcttagtcgctatgagagatgattcaattgaaggtatttatgatactttaaaacaatgtgcattgatttccaaaactgctggtggtattggtttacatattcataatattagaagtacaggttcttatattgcaggtactaatggtacttcaaatggtattataccaatggttagagttttcaataatactgcaagatatgttgatcaaggtggtaataaaagacctggtgcatttgctctttatttagaaccttggcattcagatattttagattttatcgatattagaaaaaatcatggtaaagaagaaattagagcaagagatttattccctgcattatggatacctgatttatttatgaaaagagttgaagcaaatcaagattggacacttttctcaccaagtgaagctcctggtttaagtgatgtttatggtgaagaatttgaaattttatatgaaaaatatgaaaaggaaaatagaggtagaaaaacaattaaagctcaaaaattatggtattcaattttagaggcacaaactgaaacaggtacaccatttatgctttataaagatgcatgtaataaaaaatcaaatcaacaaaatttaggtataattaaatcaagtaatttatgttgtgaaattgttgaatattcatcaaatgatgaagttgcagtttgtaatttagcatcagttgcattacctgcatttgttgaaagtgacgaaaattcaacttggtataattttgaaaaattacatgaaattgttaaagttattgctaaaaatttgaataaaattattgatttaaattattatcctgttaaagaagctgaaaattccaatttaagaaatagaccaattgctgttggtgttcaaggtttagctgatgcttttatgatgttaagattaccatttgattcacaagaagcaaaagaattaaatattcaaatatttgaaacaatttatcatgcatcattagaggcatcaattgaaatggcacaaaaggatggtccatattcaacatttcaaggttcacctgcaagtcaaggtttattacaatttgatttatggggtaaaaagccaactaatttatgggattgggatataattaaggaaaaaattgctaaacatggtttaagaaattcacttttagttgcaccaatgccaactgcttcaacatcacaaattttaggttataatgaatgttttgaaccatatacatcaaatatttattcaagaagagttttagctggtgaatttcaaattgttaatccttatatgttaagagatttagttgaattaggtttatggaatgattcaatgaaaaattttataattcaagataatggttcaattcaaaatttaccaaatataccacaagagattaaagatttatataaaactgtttgggaaatttcacaaaaatcaattattgatatgtgtgctgatagaggtgcatatattgatcaatcacaaagtatgaatattcatttaaagaatccaacaatgggtaaattaacaagtatgcatttttatggttggaaaaaaggtttaaagacaggtatgtattatttaagaacacaagctgcagcagctgcaattcaatttactgttgatcaagatagtgcattaagtgcaggatcaactgaagctttattacataaattaaatattaagaaatatattccaagaaaattaaataaagttgaagatgttgaagttaaagttccaattaagaatttaaaaattgaagaaaattttaataagttaaaacttgataatgaaattcctgtaatcaacagagagacggaagaagttgttgaagaagaggtagcagaggttgcacctgttgttgaagaaaagaaggaaataattgttgttgaagaaactacaactacagttacaagttcggctgacggtactgaggaagaagttgatattttcaattctaaggtaattgcatgtgcaattgataatcctgaagcatgtaccatgtgttctggttagtataatggtatatcactctttatagttctttgtattttaataataataataataataataatagtaatagtaatctgaaatagatctacacttcacagacgcgacgacgcggtgggtggcaattttaaatttttatttatttatagtaattaacagaagatcatcatgtggtttacttggtgttaggttttaatgagttgggttattttccgtttagataagtacaatggtatgtattatgcaatgggagtggttattaatggataatatactaacaattataatataatatagtcagataaattaagtcctgaacaaattgaagaatttaaggaagcattttcaatttttgataagaatggagatggtaaaattagtccaagtgaacttggtacagttatgagagcattaggtcaaaatcctacacaacaagaattaaatgatttagttaatgaaattgatacaaatggtaattcaatgattgaatttagtgaatttttaacaatgatggctagacaaattaaggagcaagatgttgaggcagaaattttagaagcatttaaagttttcgatagtgatggtgatggtaaaattagtcaaactgaattagttagagttttaacaacaattggtgaaaaattaactgatgcagaggcaaagcaaatgttagaagctgctgatactgattctgatggtcaaattgatattgaagaatttgcaagagttttaaaaggtaaataaataaagtatttagagagttatatatcttatcatattatattatattatattatattatatactattttgttaattagtttccaaatttttatttgtacctaatttttcaccactattttgttcattatgagttggtaaaattggatttggattattaaaatcagttaattgataacgaatttctttaacatcattttcccaagtccatttaaataattcaattgggaaaattgattcaattgaatatttgaaaatatttaaattttcaattttaccaagtaaattaaatggtggaattgcaaggaatgcaatataatttttaaaaatcaaaacacctaagataattgaaacaaaatgacctaagaatgaacttgatggaacaagtataaatgaaataataagataaattaatggtaagaaaattgttggtacattataatgagtattgtaaattgtagtataaggattattaattgaattataacaacaattaattgttaaaaatgtaaatgcccaacctgatgaacctaaaattgaaacatttaatgaatcatcagattcaataccaatataatttaaaattaatgaaataattgtaaatgcaataccagtaattgcacctaaagtatttaataataaagcagtatgtaatgaaccatgagaattttcaaattgtgataatggatgataaagtacaattatatttgataataaatgtaagaaattaacatgaattaatgggaatgttgttaatgaagttgtattaccacttaataaagaatttggtgataatgaccaattactgatgatatttggagagaaaattgatgaaatgtatgttaagatcataaaacatgtaacaccagtggaaattacaggtaatgggagtgatacaaatgttgatatttcagttaatagttggttcattgtttaaggagattggtttgtagaaatgaatagaaaaaaaagtagatggtattgtattataaacatgttgaaaaacttttgtttcatgaaaatgcattcaagttcattactttgtttcattattattactgtaattgtgtgttatatatgacattataacaatcatactcaatgatactcaatggtatcgaataaagaataattttacctcttattatacataatatacactacactataatttactattatttactattattacacaattcagctcttaataatgccactcttaaagcaatttcctcatactgtaactcagcagaacgagcagcttcagccaatgcaaaatccaatggttcagttggggtattatcaatattatcttccttaccactacctacaacatatttaacaaacatttcaccagtagtatcaccattctcctcttctaaccatcgtaacaaagcattctccaccctctgtctctgatcctctgtaacgtgtaatggcagcaccaaatccttgtcactgtctctatctctactcctatccattataataataatacagaacactaccaaaagaatataataaatctccctcacagagtaaattttcatgtcttcatttaatggctgcttcaatgttatcttaatgtttagtctttatcttttagtcttttggtttacaatctctgatcattatctctacaaatatgtcatctctacccgttgatgaatatgcacctgcatttgcaccatttttcggatttgcaggttgtgcatttgcaatgattttctcatgtttaggtgcagcaattggtaccgctaaatcaggtattggtattgcaggtattggtacttttaaacctgaacttataatgcgttctcttatacctgttgttatgagtggtatcctctctgtttatggattagttgttgcagttttaattgcaggtggtttagctccaaataataattatactttatttaatggatttatgcatttagcttgtggtttaagtgttggtttagcttgtcttgcttcaggttattcaattggtattgttggtgatgaaggtgttagacaatttatgcatcaaccaagattatttgttggtattgtccttatccttattttcgctgaagttttaggtctttatggtatgattattggtttaatacttaatacaaagggtaattcatagtgtttatatatagtattaatagtatataattaaaagaaaaattattacaatcagttatttactccataacaacatcaacatcaccattacttttattattattattattattattaaattcaacattaccattatcatcaatataatttgattcattctcttgtaaataactaacacttctacttgaatctaagaataataaatatgctctcttaatatcttcaatttcaatttcattacttcttctctttttactcattaaataactaacactaattaaatttgatgcatatcttaatgatgtttcaactccaatttttgttaataatttaattgcatcattattaatttcaacttcttcctcattacatctaatttttaaaattgattcaatttcatcttcttgataattttcagtttgaattataatacttctatctaataaatctaatggtaatccatgtggtgatttataatttgtacctcttgtctttgaaatacctctatttgttgccattataacaattggagaaaattcatcctctaataatctattaataaatgaaaaacattcaatatctaacatatgaacttcatcaataaataaaactccaggtattatatctgctttaccttcttctttccattcaccaacttttaaattaatttgatctctaacttcacttctaatttcacctgtatcaccactaaataatgcaaggaaaccttgttgtcttgaattaattacatcaatttcatgtaatgaaactgtatgtaaaacttctttcctaacttgtaattcaccctctgggcatgaaataaattttgtatcactacccattgcatcataatctcttgctctactaaatgatctacctaatttaataattttaccattacttttatcaattgaaattatatcacctgcaataattttttctttacttaattcatcaatcattttattacctaattcataaattgtttccatatcagttgtcctaattgtaattttaccttgtttatgaccaccagttaatgatctatcaatttgaatttcaattacttcaccttcaattacttcagtttcttccttaattctaattccaatacttttacggaaactttgagttaatgcctcagttttactaatttctttactgaaaatttcacttgcagtaattgcagtgaaaggtacatctttacctaaattttgtgataatcccattgcaagtgcagttttacctgtacttggaggtcctgcaattaaaattgctctacctgcaattttaccttcttcaaccattcttaaaataatacctaatgcttttcttgcctttaattgtccaaccataccttgagaattctctcttggttgtaaattatcatctaatcctaaacctgtaatatgagaatgtgacgcaataagcgccaaattgttaccttcattggtaataccctctgttgatgtagtaattgacattgtatacctaaagaagcagatacattaaagttaaaaaacattataatttaaggaaagagaaaatttcattaaaaaaattgaaatctcaaattgaagaacaccttttaccacttactgctttcttatatttatatttatattacaaggacaatgtctgcaccttcacagagtaacagtaacactgctcaaactaaggagagtgtctctccactgcctcctttaccatcctcacaaactaaatcatctcctcttccaccaccaccaccaccatcttcatcttcatcttcaaaaccaccactaaaatcttatcaatttgcaccttcatcaatagagggttggaatgattgtcctattgtaccatcaactactaaaccacaaactcgtaggaagagatctcatcatatacctcatattcaatcattgcaaccattaactgataaatgatattatattatatcaaaaactactctatactattcttttatatataatctttacttaaaataaccatttataaacataacccccattatttaattaaaacctctttagctttattgatcttcattgcaagatattcactaccacctctatcggggtgattttgcataatcatttctctatgtcgttgtttaattttacttatattgaaaacatctttcttacttaaccctaatatatccaatgcttcattaacatcaacatcagtttgaaatccaccaattgccatatctggatccttggaataaaatttatcccaaaatgtaccaccattactaacattacgcaaataaataccattcattctagcaatttcaaaattagttaaccttctacatcgactaactgtctcaatagttgccttagctgtgagtgccactatagtaaccccgaaccctactataattggaatcataatgtcctatacatacattgaaaagaattaacagctgataataataatattaagccttcaataaattttccactttgacacatcattcttttcggatcaatctttaacgactttatctctatttatacgtgtattttcctttaatttatactgctatatctcattatatatcattcaaattaagacaaggatgaacagacatgtacagttggcaatatgtgttgtaggaatttacttttctttcctatattgggcttatttacaagaaaaattaacttcatcaaattattcaaattcatcaattgatccagcttattttaaatctccattaattattcatataattcaatcattattctcaattataattggaactatatatattacaacaattggtgattataaaccattattaaacaattttagtaaatcatttttcaatttatacattatttcaatttcacagacaatttcatcaccattatcttattcttcattaaattatgttgattatttattatttttattaactaaaagttgtaaacttataccagttatgttagttcattatattttatttggtactaaatataaaaaatcaaaatatttagttgcattaattataactattggtgtatcaattttcacaattgcaacttcaagttcaaaatcaaataaacataataataatggtaataatgatcaaatttatggatttatattattacttgcatctttattattagatggtttcactaattctgctcaagatattatgttgaaaaaggataattcaattaatggtggttgtttaatggttggtttaaatatttgtacatttttcaatcttttaatttatacattaacattcacagatcaatttaattatataaagacatttgttttgaataatggatatgcagttatctatgatttattaaaatttgcactttgtggtgcaattggtcaaatatttatatttataacattagagaaatttagttcagttgttttgattactgttacagttacaaggaaaatgttaagtatggcaattagtgttattcttttcggtcattcattaaatttatctcaatggtttggtattattttagtatttgcaggtattggattagagagtgctttgaaaatatttaaaccaaagcaaaaggataaagttttgtaaagttttgtaaagttttttgtaaaattaaattacattgaattaaaagagtgtattaaaaattattgaaaaagaaagtgttataaaaatgctagtcatctaaatctattatttattatctatgtgctaattgtaataaacaacgtgcagctccaatggatgatggtgttgataataatcttgaaggtgatgaaagtattgtatcattactaaatgaatgtgaacgttgtttattacgtcgaagtggagtttcagttggtattaatggtgcagataatggtggtggtggtattgattgtgttaatgaagtttgaaaaattgtttgatcaggatcttcaactgttaaatcttcttcatcaactgttgaattagcattagcactattattattgatagaaccattactcattgttaaacttgtattgaaaatattacgtggacgtggaatgaaaatatttgaaggttttgactttgtacttaatttagatgtatgtgcaaatctcgatggtgatgtaagtgataatctaaaattttgtgaattaattgatggctttgtaattttatttgtatttgaatttgactttctattagatttagatttaccaattacaacatcgtctaatcgtgaatgtgaacgttgttgaatattattaacattaattgaatgttttgatacttgaactttttcaagtgaagttttatcaatgatattgtcattatcaatcttatcacaactttgatcaatagtttcattattatcaattccatcatcttcatcttcattttcctttatttttactttctctttctccacgggttcaaattttgcagttttcaataataaactatcttcaactttatcattaccattaagtttaagtgaagaagttggaatatgagtttgattagtacgtactttataataagctaattgtaatttcattttaatcaatctagcccttcttaaacgaggtgataattgaactgaattcattacaggtggttgtaatggtatagtttgtaaattatctataccattaattgaatttttaacaggtgttgaatgtgcaaccaaagccatttattctaatgaataacaacaaagtattaaagtattataactagatagtagtagtatacttgatgtgacaagtaacgtaaaagcatatacgcgtttaagaaaaatttcaaattgaaattgaaatggcaaattccgcattgggaacgaaatgtcaacaaaaaaattgcgttttcttctattttcttaccgtgtttgtttacttttatctttatttattctttatttattcatttgttattgtctctaattgtctctattgttttcattccattagttttattcctaactcacatcaagttcctaatgtttctttgtttatgtttatactaattgaaatttaaccttctattatctttttagtgttacctactcaaaaaagtctatttcagaaactatttcacgcagtctagtaacaagtctctcttcaactttttcaccacttgcaacacgtaataataattcatttaatctagctgatcccagtatatcaacatgttcagctgtatctgctccacctcttaaatcaaatacatctggcatatgtaataattcaactgttataacttcagaattacctggattataatcactattctcttctgcccatttatgacacattgaatgtgttaaaattgaaactgtaccatcaccttctccaagtaaaacagattctccaccttgtggattctcattggcaatactaacacctaatggacctgattcatcctctttataaaaatatgctctctcagttggtttaccaactccataaaagcaaaatattttcatatccggtgcattaggtaatgcaacttctaatggattactccatttactcttatctaatttattcttttctaattcttttgcacttttagcatatccaaatgaatattgttcattaattctacgtttaaaccattcaggtccttcatcaagtaacaattcaatactatctgtaatacttaaatttttatcacccgattctccaattaatctaataaagtttgcaaatgtatcatcaccttcaataacacttttctctcccttaccaacaattttatcatcaggtgctccattactagctgacccccataatttctcaccacctttaggtaacatacctggtataccaccaaatgtttgtaataaatgagctctttcacgttttgaaaaaaatttctctaaaccataaactgccattgcatttaattgaactgtatctctcatttcacctgataataatgctgtaactgcctttggtgtacctaatgttgaaccagatatatcaactaatgcagcaatatgatcattaacccatgttgaaccacctccacctccaccattttcaattggtgcttcaacccattgtaaaaaataaaatgcaatttgtgcacccattgaatgtcccattaaaactgtacgttcattttgtaatttattagttgtctcaatttgtgcctttaatttagagaaataaccatctcttctctctaaatcataatatgctaatctccaatcatatgctgcactaaacatattatcaggtccataaccaattgctgctaaattttgtaatactttattccaaatccaatatcctgtaacgaaaaaatcagctgcttcaaatccttgagctgcccttaatttaacacctggtggatctaatcctgtctccggatctaattctaaatgttgaatccaacataatttctctaaaaccatggttcgcagcataaagaatgaaccccataaccttttcctaaaataattcttacttggacaatcctcactactaccttctaatccccaactctctaatcctgtactaacaactcctggaaccattacaacgttatgttttgccttagtaccttctttatttaattgtaaaccaacactaaatgcaccactctcttgttgtgcctcagttttacgtttttccattgtatttaataatccatcaggtaaataacctttccaatcaacaccttcaagtgaaagtgaatctaaatttaatgaatctaaatttaaatattcatcaaatcctgataatatatcagatgatatatattctttatgactataagccgcaatgaataaaccaataataataccgaaaactaaaacaaatcttctcttttcccaaaaatgttgtccaatagtgttattattagcctttttggttaaatatttcttctgtgaatgtgcaacatcttgaatcttatcatcaattttctcaacttcactttcaagtttatgaatctcttcaattgcttcctccttctcatgcaggagttcgtctagttgttcatcggttttatcaattaacttgtcaattttctggaaatcagcactggtagccccctcagagactttctccccactacctttcttattactcttaccttttcctctctttctaacggtcattcttgtcaatgcactctaaataaacagaccaacttgaaaaggaaaggctcatgaaagagaggtaattaataccagtactgtaaaatctcgcattccccatagtaaattaatttctaatttttacggcctgattttattgtctcagttttacgatggcctttctgagagagctttattggaggagcctttttcttttaaaggaggttatttatacagctttgtcactcgattcagtagtaaatacgggtaaatatagatagactaaatgacatcacagtacatacgttcaaggttctcttcattacgtgaatatctggcaccaatcaatcatacttcaacatttgcaacttcaggtgagataacaccagaggaatttgtaattgcaggtgattatttagtttatagattcccaacttggcaatggtctcccgctgataatggtaaggagaaaagttttttaccaaaagataaacaatttttagttacaagacatgttccttcatatgttcgtgcttctgattatgaaatgattgatgaagatgatgaaattttaattggtaatgaagatataggtgatgatagtaatggtagtaataataataataataataataataataataataatggtgacgggtggtcaattgcaggttcaagttcctccggtaagaaattaagatctaaaagtatagcatctaaattaggtagtgatgatggagataatgttgatgaggcaagtattaaggaaatttctgatgatgaagaggatgatattaatgatattgatgatttaattgatgaaaatgctgaagatgttgaatttgttgatactcatttctccaagggtaatgataataataacaaattatctaaaactaactcattaaacaatcaatcatcgaaacgttattatgatttatatatttcatattcaacatcatatcgtgtacctaaaatgtatatggttggatttaattcagattctataccattaacaccaactgaaatgtttgaagatattgcaagtgattatcgtcataaaactgttacaattgaaaaattaccatttttatcaaatacaacagcagtttcaattcatccttgtaaacatgcaactgttatgaaagttttaatgaaaaggtcaattattgcagctcaagaaaggaaacaagaaaatgattctaaattaattaataaaatatctaaacttggtatcaataataatgatgatgatggtaataataataatgtggaagatgattgggaagaattaaaggatgaaaaaattgaaggtatacgagttgatcaatatttaattgttttcttgaaatttatatcaagtgttactccaggtattgaacacgattataccatggaagcattataatgggtgtgttttgtttattatttctttgtattttttagtttggtatttaattattcagatcaaggttatattttataaaatttttttaaaaaaaatgactattatgttttattccaaatacgaacacttttatcaattccacctgtaattaatctttcaccacttctatcaaatgttgaacataaaataccactttcactagataatgaaccaggtactggagtttgtaaaccattttgaatcatttgaccattttcccaattccaaaaagcgtatttaccattatcacaacctgcgaaaaccattccatcatcagatgaactaattgtattaatcattaaattaccttcattaacaacatcatgattttcccaaaaattcatatcctgtaaatattgacaatcaggtaatgaaaatttctttataccatcacttgaagcagttataatttctcccttattaccaaaattttcattatttgtaaatgatctaacacttttagaatggaaagttaaagttttcaaacatttaccagctgctaaatcccaagttttaacagttgaatcttgtgaacaactaattatttgaggatcaatatttctacatttaactttattaatactactagcatgacctgataatgtatgaattgcatttctagttctaatatcccaaactctaacagatgaatctctaccaccagttattattaaatctaattcaggatgtaaatcaattgaataaactgatgataaatgtccatgataatcacgtataactgaatttttctctaaatcccaacatttaacagttttatcatcagagcatgaaaacatatatggatgtctatctgatataactaatcccttaactgccattatatgagctgataaagttaattgtaattcacctgtaattaaatcccaaactttaattgtactatcacttgaacctgttacaaaatatgaattaaatggatcaattgcagtagaagttatttgacctgtatgtcctaataataatttagataatttccattgttcagtattaattgatggtacctgtgttttcctctgtggtataattgatttattagtaaatgtatcttcatttattatagttttgtcattaacagtattttcattatatagaattaattctgaattggtttttatttgaggtaatcctaaatcatcggcatcgaaaccatttattcgtagtgtatctaatattgatattttattactattattgaattgaattggtggtagattatttgatggatttgaatattttattgattttctttcaaattggatattaccttggtatggatcaatagtttctttaactgtgttatctggaaagaatactcccatgtctttcttcacttgatcatatgcatcagtcatggttatattttcattgctattataagctatatacaaagagattctccatgataaacattacgtaaaaagattgattaagaaaaaaaaaattttaaaaatttcactttatttttcattaatccattgtaatcattactaatctttttcttcatcttcttttttaggtatacaaactatgtctgaatttagaggagaagaaaatattgaagaaattgaaggagatgtcattattaataacgatgaagttgaggaagttgttgatgaagatcaacttgatcaagatgaaccaattgaagatgaaaattatcaattaacagaggaagatatggcagatatggcagaagaatttgaaggtagcggagttaaaattaatgatgaaggtaatttagagattgatatgagtaataattctcaaagttattttgaagatcatcaagattcaattttcacagtttcaacacatccaaatttaccaattgcagttacaggtggtggtgataatgttggatatttatggacaacacataattcacctgccaaaacaattaataaattagttggatttggagagagtgtaattggagcagaatttacatttgatggatcatatttagttacaggtgatatgagtggtaaaataattgttttcaaatcaatgaagaagggacaaatgtgggaacaatatgatagaattttagaagatgttgaagaaattacatgggttcatacacatccaaagcaaaatgttttttcatttggaggtattgatggatcagtttcagtttattcaattgaaccaacattagaattaattttttcaggttattcacattcaactgaatgtacaaatggtaaatttattcaaattgataatatggatgaattaaaattagttagtattagtgaagatggtagtataataggatggaattgttatacacaacaagttgaatttaaatttgataataataatttaaaaggtttaacaccaccatgggtttcaattggtattaataataagaataaaattattgcaattggatcaagagatagtcaaattgctataattaatattgataatggatcattattaaatttatttacagcattagaagttcaagaagatggtgatatttatgattcatcaattgaagcaatttcattttgtgatattttaaatttaatggttgttggatttgtttcaggtgatgttttaatatttgatagtaatacatggaaagttagaaaaatgcttaaatgtcaagatgcgattactaaaattgaatttttaaagaatagtccaaatttcttagtttcatcaatggatggtaaaatttataaatgggatgttagaacaggtgaattattacatgaatatgttggacatcatatgggagttttagattttagtattgattgttcaggtgaaagagttatttcagctggtgatgatggagtttcattagtattccaaatataaatagtataaatagttatagttatataacattatttagataaatttgataatttttgatcaattaaattattaatatataattttagaggagaatccagattatcatttgataattgattagttaataataaatcaacatgttgagcaattaatttacctgttaaatcaacttcaatattaacataatcattaatttttttcaatgtcattataacttttgattgagtataagcaaccatcataatttggaaagttttatttttataatcaacattaataacagttaaacttgtaccatcaatacaaataaaacctttataaacaatataattaataaattcttcatctcttaatttaaaagtataaataattgaattactatcatttttagaattaattatttgagcaattgtatcaatatgaccctgtaccatatgaccaccaaatctaacattaccagatacagctctctctaaattaacttttgaaccagtaatgagggaacctaaatttgtctttttaagagtttcctgtgatataccaactttaaaggatgaagcattgaagaaagtaactgttaaacaagtaccattaattgcaattgaatcacctaaatgacaatcatttagtattgactcagcatccccaatgagtaaggatacaccattcccaccagattcagatgtgtcaagtgtagtgtattctaatacagtacctatagtctctacaatacctgtaaacatttgttattctaaaagaagtgtctgaatggtaataatgattataaatcatccagatgaatgaataaaaatgatgacaaaccctcataagagctgagccgagcgttgaaaataaaaaaacccgcgaagggcgcgaaattaaaaattttttcaaaaagaagaaatccttttcactataaaaagagagacatatcctccgtgtcttattttattcaatcaataccttctctttaactatggggaaatatcacctccactgtcttatataattgaaattacttatattatggtattggtttatattgatattattatattaaatagtatagtatagtatagtatggtatggtatggtatatgtaatttattatattatattaggttagtaatattactagtgtattattaactaaagtatggtattttattttatattatattgtatggtattatattgtattatattgtttaaagtatatttcattaatattatattacaaatgacaattggcggtaaacgattctcctatatagatgtaatccctacagagactttcatttgcatttactacttatgttcgtttttgatgggattcaacatattatcatattattacataagttgataatatttcaagtcatgcaacatgtcctattacagccatttattattattatacctctaatgactaaatatcaaagccctgtaacccttcttcaaatcatttctttataaaataccctctttatcccgttttattcttcttttaactaactattaattcctaaactctttcttccttttaaaaaattaaaatgacatcatcaattaaagtaacagtattaggtgcagcaggtggtattggtcaaccattatctttattacttaaattaaatccttatattacagaattatcattatatgatgttgttaatatacctggaattgcagctgatttaaatcatattgatacaaatgttaaaattaattcattcattcgtgataataatgaaccaaagggtacaaattcacaattaattaatgctttaaaaggttcagattttataattatacctgcaggtataccaagaaaacctggtatgacaagaggtgatttatttaatattaatgcatcaatttgtaatgaattagcaacttttattgcaattcattcaccaaattcatttattttagttatttcaaatcctgttaattcaacaataccaatttttagagaaattttaaataattatggtgttttcaatccattaaaattatttggtgtaactgctttagataatgttcgttcaaatacttttatttcaaatttaattgataatagtttaccaaaagattttaatgtacctgttgttggtggtcattcaggtcattcaattgtaccattatttagtcaattagataaatcttataaaattttagatgatgataatatttatgatgcattaattcatagagttcaatatggtggtgatgaaattgttgaagctaaaaatggtaatggttcaagtactttatcaatggcttatgcatcaaataaatttttcaatataataattaatggttatttaggtaataatactgactattttatttcaagttatatttatttagatgattcaattaatggtatgaaagaattgaaaactggattaatggaaattttaaagggtactaaattagaaattccaaaatatttagcaattccaatgaattttgatattaatggtattaaaaatgttgattataaatggattgataaaatgaatgaaaaggaaaaagaattatttataattgctgttggttttattaatcaaaatgttgaaaaaggtttaaattttgtttataaatgatagataaatagctagtatataagaaaataaatagatataaatataatataaaataccctggttttaattactaattgaataactatcttccattgatttccaaaaaatagctaaatttctactactactacgatgaataattgaaataaaacctccaactaatggtataaaaccaataccaaaatcaatcattatattgaaaatcattttaccaattgatttaagatgaagaaatttctttgtttgataatgttttaattttaatcttttatcttcgaatttaattttataaccaattccaatttcaatcatacaaattaataaccaacaattaattgcaagtactatataattaccgaaaaatgggaaaatttgtattaatggaccaaatccaaatcctaatttcctaggagttgtaggtatatcaatatcaatatctttatcttcctttacctttttagcctttttactaccaaataatttattaacaaaatttgacatttttaaaccaaataaactttcatccattaaataacaagtttttttaatataaattacatcattttctaattcatttgggaaattaattggtatttgtctattttttaatattttattaccctttgaatcaattgaagtttcaaaatacggatcataataaccttcttcatcacttgttgtaaattttaaaaattttggtcttgttgtaccaaatattttaaggaaaatgatttttaatgcttgatcgataataaaggccatgttagaggaagaaactaaatgtaagtcaactccgagagatggatcttatcgtagattttataagaattcattctaagggacaggcagattatgcggcttagcaaggtaccgtacggtacgttaagtaaaagaaactacactacatttacaactacaatggtcaacacactccaactttttagattatattatattacttgtcagacagccacccattcccatcttaaaaaatcacttccgaagaagtacattaattaagacaaagatcattgctcctttatttacctgatgaaaaaaggaataaaaaatgaaatttttaggggtcgtaaattatccagatgactagattactaagaatcgtagacaaaactgtaatgataatttactattataataaaagaaagaaagaaattcttccaattattacatttattctcactttgagggtatgggggttctatctcatcaaccaagttggggtcagtggctctttagaagagtcaaaaagtgacgattcctatagaaatgatcctatgaagtacgtcgacaaagaaagaagacagatcaaaagagaaagttgcttaagaaaagtggatatttactctcttttatacttgaaaaagtgagatagaaaaagaaaaaaaaattttaaagagggcttaattaaaggtctttttagtaatagggtttttaatagtatagtaaatatggtctgtatgataagtagagtattaagacatagagggtatattatgttagataattattaaaagtaatagatacaatgattataaaataaaaatatataagattatacatcatcacaattaaaggtaaccaattttattagcaatatctaaagcatcataatcagcggttaatctaacataagcctttttagtaccatttggtctaattaaagtattaactttttcaacttcaacttcatataattctttaacagcttgtttaatttgatatttatttgcctttaaatcaacttggaaaactaaagtattaccatcttcaacttttttagttgcagtttcagaagtaattggagtttgaataactttataagaatctaatctattataatgaggaactgccttgatgtattttggagatctagctaatttaagagttttaggtaatctaaaagtagttgaagttctaactttaacagctttagaggaatttgcacctttaagagcagatttctttgcagattgtgctttagcagttgaagaagccattgttgtctaataaatgaaaagaagtgttattaagatattaagataagatagtgaaaaaatagaggattgatattcttaatatagcgaaatttgaaaaaatttgtaaatttaatattataagagagagagtataataatttaatttgtgtgtggttatgacatctttttgtgttgtagaaccctctgtggctgcacgtgatattgagggtttattttatactctatatacagattatacactatactatactatactaaattcttcttcttgaaggagctctattaccaccaaatgatattggtgttaaatcacttaatttagtaataaattttctgatttcattaccttctttaccctttaatgcatcaaagaatgctgatctacccttaccgaaacctctaatgacaatttctaatttatcatttttaattaatttcttttcattaattattttaaaaatatttgaacttaattggaaacttgcctcatattcacccctctgtgctttcctaaatcctaaatatcctgttgattgagaaattgaaattttttgtggtaatgttaaataatataaaacttgttcattaaatgataatttagaattagtttcttggaaatttttatccatttcaactctagttaatgttaaaaatgtattatttttcttaaaattacaatgtaaaatattcttaatagtaacaatatcctttacttgtttaattgaattctttttattatttgatttagtactattattattagcaacttcaccaaatgtagttgcattcctgataattgaagatgtactaaaatttcttaatcctaaacgacttatcctttgcatgttgtcttgctctaaagaagtacctatactatacttcactatactatacaatactcttaataaatggaaatttcagttattatgaaaatttactatggtgcactgattatgtaattattactatagcattaccttcttttcattgggtataggatggattacgtctattttgatctatctataggggatttacaatgtggtagagtagtatttgaactattcactaaggatgcacctttaaattccaataattttattaatttatgtgaaaataaatcttatgtaaatacttatttccataaaattattaaaaattttataattcaaggtggtaatattaatattaattcaaataatgaaaatattgcatcaaattatcctaatattgataatttagcaatagataatgataatgatacagatgaatttttggaagatgaaaatcttattaatttagataaatcattcttactttgtttaactaattttaataaaaaaaatcataataattcacaatttttcataactttaaatcaatgtcctcatcttaatggtaaacatacagttattggtaaagtaatttatggtaaatcaattttaagggaaattgaaaaatctaatgttatttcaaataaattaaatgataaattatcttggataccttcaataccaattataataactgattgtggtaaatggaataatttaatgtcattaccaaataaatttgcttgtattgattatattggtggtgatatttatgaagaatatcctgatgataatgattttgataaattaaatataaattttgaaaatattcaacaatcatttgaaataactttgaaaattaaagaatctgctacattattatttaaaaataaaagattagaggattcacttttaaaatataaaaaagctttaagatattgtaatgaattaatacctgatgaaaattcaaataaggaaatgtttattaattttcaaaatttaaaattaacaatttatttaaatttatcattagtttcattaaatttaaataattatgaattatgtattaattattgtggaattttattacaattaaatgataataaggatattaaattgacaaatattcaaatggctaaaattttctatagattaggtaaatcttatagattattgaaaaaattcgatattgcatatgaaactttaaataaaggtttaattattgttcctaatgatatttccattaagaatgaatttgaaattgtgaataggataatttcaaagaataaagaaactgaaagaaataattatgcaaagtttttctcttaataataataataataatcgctttaatttttcacataataaaattcttatcaatatctatattaattgacttctcttatatttatatttatattttatacactactctataataaattaatgaatcataataatgaaggtaatataaatagtattttgtttgaaaagagggaaattttaaatataacccccatttcaacattatcaagacaaatttcagaaattaaccttaataatagtgataatgatgatgaggagggagatatagtactatctcatactaagagaagatctagtgtacttaggagaatgtcagtagggtatcaaattgatgataatcaaaatttaaaaactaaacttgatatatttactgacactaacgatgaattatataaaagatcaaattctaatacaccaaattgtaaaataaatgattttgaaaaattaaaagttttaggtcaaggtgcatatggtaaagttatattagttaaaaataaatataatggtaaattatttgcacaaaaagaattaaagaaagcatcaattataattaataataaaaatattgaaagaactttaagtgagagaacaattttatcaaagataacatcacatcaaaatattgttaaattattttatgcattacatgataattcaaaattatatttattaatggaatttataccaggtggtgaattattcaaatatttaatcaaggagaattttcttaatgaaaaaagttcatgtttttacataattcaaatgtcaatggcattaaattttttacataaatttggaattgtttatagagatttaaaacctgaaaattgtatgttagataaagatggttaccttattttaactgattttggtttggctaaaaaatcaactgatgatcaagatgataataattggtgtaattcaattattggtacacctgaatatgcagcacctgaagttttaaaaggtgaaaattatggttcattagcagattggtggtcattaggttgtgttttatttgatttattaacaggtaatccaccatttactggtaataatcatcaaaaaataattaataaagtattaaaggaaaaacctaaatatccatttcatttaatgacaagtagtaaagaaattttgaataaattattaaataaaaatattaataaaagatttaatgttgatgataattggataaattatcaaaaattctcatttttcagacattataaatttaaagatattgaaaatagagttgtggaaccacctattaaaccaattattaataatcttgaaaatgcagaaaattttgatatagaatttactaatatgaaaataagtgatttaaatggtgatttaaatggtgatttaaatgttgataataatgtaaatgataatgattgttttaatggattttcttatactgctagtaatagttttatggatagttatttaaagtaaagtaaagtaaagtaaagtaatatttttcaaatggggctcgtcaattttaattttcttatcgctgtcttattacatgtttctgtgttgtgtggatgggtttattggtggtttgtgggtggttttatagggattgtggtgttgtaggtagtggtggtagatagagagagtattaaagtatatgtgtatgcttttattgtactttaaaaaaagtatttatgggttaaaaatgataactatacgaaaagtacatgtagctaaaaagtaaaaaatagctatttcaacacatgtctagaaatgatattaaaacacagttgggtatttaatttataaaatattataaaatacaataaacaagtcctctacttattacaatttataaacatgacaatttaattcagattcaattaattctttttcagttaatccccatgaaactctaaaaatacctgaattaattaatggcatattaacaatatatttagaaatatccatatttatttcatcattataattaattataatattcctaactttcttatcttcaattaatttaggatcttttaatttattatataaatcaattaatgataatttagtattatgtacaatttctaattcattttcctctccaataagacttgtaaataaacaaacaattataacattctcatcagttgataataaaagtgatttacctaataaatcacttggattcgatacaatttgacaatatttattatataatttataactattaaaataattaattttaaattgtttagcaattccaccaccccaaataccaatacaattacatgaatgagctaataataatggacttgaagttgtttcattagttaatttgaataaatctcccttgaaatatttaaccgtcattaattatcaaaagaaatggataacaacatgaatcgaagtatataaaattttcgctggattctatatacacattacctctttttactaaacaaatggatcctgaattaattaatgatttaacagaattaaataaattattacattttgaaaatatttcaataagaaatagattattatcaattgaaaaagatactaaatttattaataaaattcatgaaaattattattcaaattatccaaaaataccaaatgaaagatgtggtaattggtatgtaccagaattcccaacaacttcatattttaaatcaactgatggtcatacaaataattggtcattttcaacaaagagattaaatttacatttattaaggattattattgaaaataatggaattttaataattgattcaactagaaggggtaagaaaatacctgattcattaagtaaaacaataccaatttggatttctattataaataaaattattaataatagtgaatttaaagatacttttaaaacaccaaaggaaacagtttccaaatatgaaaatgatagaatattggataaattaccagaattttactcaaatattgaagattttttagatttaattaaatcaaaagttaatgaacaagagttaaaattattgaaaccattttggatttatcccagttgtaaggaaatcccaattttcacaggtaatgaacctttccatccaattataatgatttctgcaagtgaaaaatttcaagatggtgaaaataaaataaatggatttacatatgttcaaggagctggtgatgatcatgaattatggtcaaatggattatcaccaaaactttattatcaaaatattgagaaatttaataatttaattaatttaaatgataatgatgttgaaaaattaattaatgaaatagtaaataatgaaattaataaaaaatcttcgataattagtaataataatttattacaattttggaataatgatgatatttatagagttaatgatttattatattttggtaaagttaataaaaatatagaattcaaatatgatgaaacaaattattcagaattttctaaaataattatacttgattcatcatttaatcttttaataaatgaaaataaaaataaaaaacaagatataattcatatctttaaattagattcaaattgtaaaaaatcatctaaattacttagatttaaattacctgaaataataaatattgttaaaacatcaatggataaaacactaatactttgtaataatggtgaagatttatcaattggtgttataatttgttgtttaaatattaataataataaattaaatttatcaaaagattcaataagacgtgattttattaaattattagatataaggaaacttaacccacaaagagcaactttaaattctgttaatagttatctattatcttaattactgtaaatattaattatccatattttatatcatatattttataaaaaaattgtctatgtaaaactttgattgaaactgttattaatatcatgattaaatgatcttctacccttgtttcttttacccttaaagtttttaccattattattattattatttccattatcaccataatacattggttgaacatattgataaacaaattgattatttgggaacactccatattcattagttggagtctgtggtggaaatgttggggtatttgaataataatatggtggttgtggtgttatcatataattattaccttgtgaatagtatgtctcataatttatacttgatggtccaatatttggagttggtgttgacattggttgaaatgatgaagttgatgttgatctagaaatagaattattactatatcttctattaattgaatcttcatctttttcttcaagtgtatcatttctatcattatttgttgtatcttctggtccaacactaatttcaatttcaacatcatcatcatcaacatcagaatcatcaatatcaaattgtttatcctttatttgtgatgatttctttttagcagatggtgaactaatacccataccttcaaatgctgaatcaaatttaattgcaaaatctgtatcaactgaataattacttccaattgacatatatgaaaaactattatttctcttatcattattttttgaaattaattttttcttatttttctttgatgattttttctttggaggatttgcacatctatccttaccataagaaattataaaatttttatatttattattaaatgattcatgtaaataaattgattcttcaccattaaaattaaaatcattaatagctttaatacatgataaaatatttgtaaaattaatgaaaacacatgcaccatttttaaaataattaatttgttcaatttcaccgaaaattgaaaaatcacgacgtaattcattctcatttggaatacatttataaacttttttgtaaatatcttcattttcaaaattttcattattattttgtaatttatttttcaatttttcatcaattataaaatcgtaatcattttcagtttctaaatcttcattaattccaatatataaatttcttgaagcaccttgatcaacagcttctttaataacagggtgtaaattaccagaatttttaccccaaccaatattaagatatttatgattaattattattttttcaattgaatattttgcaataaattgagctgcatcttcatgatataaaaatgttataaaagctgcatttttatttgttaacactttaatattttctaacataccacctctaattgtattacaaatattttcagcagttgtattaaaagctaaattacctaaataaatagttctattattaatattattttgatttaaaattgaaatacttctctctgatggtatatctgaaaatgagaaagattttaaattataaatattattatgactataaggtgtaattggaattggagttattgaatttgaagagaatgaagtatcataatgcgtttgataaggtgaaaatgtgaaagatttatggaaagttggtttgttaaatttattataatattgttgactttttttattgatattatgatcttgattggtattattattattattattattattattattggtattcttactattggatctactaccaacatctatttcaacgtcagtttcattacttatattttctatacttctattactattaattaattttgatgtaattgtatttttttgtttattatcggttgactctcttcttgaagatattgaagttgaggaaattgaataattttcattaacaatattatttctctttaaagaatttaaatcatttaaatcattaaaagtatctaagaatgaaattgatgaagataaattaatttttttcaaattatttgaatttgaatttgaatttgaatctgaattaaattttctatcatttgaataaaatattattgaatttgataaaattgaattacataaaggtaattgattaaaacatttaattgcatttaaaattgaattaaaatgaacaaagcaagaatttttattaatattataattaatatttgtaatttcaccaaaatatgataattcattgaaaattatttcttctgataattgattatttaaatttgataaacataaagctcttgatgcaccattattattaatttcatttttcaaataatttgataaaagtggtgatttaattttaattatatttaaattttcagaatttaaattaatttttaaatcatcaataattgaaattaattgattataacatttattagcagtaaatgaatcaataaatgatacaataattgaacgataaggatttgaaatttccaaaccttttgtaggagatgaatgagatgatgaatttgataatgaagaagattcatcatttaaatcaaaatcacaagattcaattggaccaaaattaattaaatttagtatatcagataatgaaatttccaatggtaaatttaaaaatttcaaacttcttgtaattattgatatattagatgattcattatgatcttttagttcattatcattaatattattattaatatcattttcatcatcttcattaatacaatcatttaaagaagttttaaatttatttaaaagtggagtttgtaaatcatttgagaatgaagaatttgaatcttgataaaatggtgaaccaataactaattgttttggtaaaaatctttgaggattatttgattttgtattattatttgtattattatttgtattattatttgtattagtatttttaattgatgataaatctaatggttcaaccaatgattttgaaggaggtactttaggagatgaggatttaggagaggttgaatttgaatttgaatggggattgtgattgacagttgacataatagcaaagaatagcaaagaaatgaaataaaatgatgtaaaatgaaataaatgaaataattaataaataatgttatttaaaacacaacgagagggtatattaagtatatacaggcaggtttaatatagcaaagagtgtatataataaataaatagggtgtagattgattgccaaaggaaagaaagaagtgaaggaaaggatggcaaatatgaaaacatcaaaacatcaaaatgtcaaaatatcaaaacataataaattgccctttttctattattaaaaaacttccatgagcattgattgctatcattattattgtttattattttattgtttattatcatttttattattattattattacgtaagttttaaagtattatattattaaattaaataaatataaataaggtagaaatagaaatcatatcatatcattaatttaagctgatgaaactttagcaacatgttctaataaatcaacaactctagttgaataaccatattcattatcataccatgaaattaatttaacaaatgttggagttaaaaggatacctgcctttgcatcgaaaattgatgatcttgaatcagagataaaatcagttgaaacaacttgatcttcagtataacctaaaataccctttaattcaccttctgaagcttccttcattgcagcacaaatttcttcatatgtagtttctttctttaaattaacagttaaatcaacaactgaaacatcaacagttggaactctcattgacataccagttaatttacctgctaaaactggtaaaactttaccaacagcctttgcagcacctgttgaagatggaataatattaccacttgcagttctaccacctctccaatctttatgtgaaggaccatcaacagtcttttgagttgcagtaattgaatgaatagtagtcattaaaccagattcaataccaaatttatcattaattgcctttgctaatggtgctaaacaattagtagtacatgatgcattagagacaatatttaaatctttagtatattcattatgattaacaccaacaacaaacattggtgcatcctttgatggagcagtaataataaccttctttgcacctgcatttaaatgtttagttgcaggttcaacatccttaaagataccagttgaatcaataacataatcaacaccaattttaccccatgggatattttctggatctctttcgttataaacagtaatatcagcaccatcaataacgataccattttccttatgagtaacttcacccttatatttaccgtgagttgaatcatatttaaacatataagctgcataatctgaggtaatgaatggatcattaattgcaacaaccttaatatctggtcttgataatgcaattcttaaaactaatctaccgattctaccgaaaccgttaataccaactgtaatagccattgtgttttgttaatttgtttgtttgtttgtttgttttgtttgtgttacttgtttgtagtaaacaattgtgatgaaagaatataagaattaagtaaagagttcaaaataaattaccagtggcaaatccaattataaaactgggaaaacatgtctccttttatatccattatcaaagacaaatataaaatggtcatactctctccgggccaccttcacccccctcagcgctaagtggtgtcaccttttctccgggagtattatatgctgattaggtaatcgcatgattattactatattattgtcttattctatttatacacggactacacggactacacattccaactgaacagtgatggtgattcacttcttgatctttccactttatcaaccctattggtatcatattcataatctccattattagataccgtcttttgtcttttaatattagtattagcattaccagtattattattatcaaattcaaaatcaattaatggcatacctaatgatgcatcaactccgaaatcattcatcatcagtaaatctgtaaatgatttattatcataaatattcatatcattagtattaatatcattaatattaatatcattaatatttaacattgcatttaaattaaatccacttaatgaattactatcactaacttttgattgtccctttaataattcaatttgtctctctaaattatcttgttgagtttgtaaaaattgttgtttcttttcaataagcagtttctgtctttcaatattatcattatcattatcattttttaatatattattcaaactttcttcctccatttcctttggatcttcagacataaatttaaatatatcagtatctatattattatcattaaattcttcccttttaatacttttatcattatcattactaacccatttattaataaccccattactactattattcttattcttattcttattattagaaaatatatcattaattgcaatttccttcttaatacctttattatcaacatctctctctcttttaactttagatttcatattcaaattcccattacttcccatattatcaaaatttgatacattctttaatggtgaccctccattaactttcttattctcaaattttaaattttcaataatttcattatgaatttcattatgaatttcattattaattttaactttattatcaatttttttaactataggacttgtaataggtgttgtaatattattactaccattaggacttacagaattattattagatttaggttgtgataaaattgcttcaattgcattctctaaacatgaaatacatgaatctgataaacaacctaataatccaattttattctgaatttgtaattcataaattataccatttaataaatttttaacttcttgaaatattgatccacctctagtatattctaatgaattttttgctgctaatagggaaaatcttgcaatttgtctcgataaattaattggtaatggtaaaaaataataattatgttttgaactatttaatatcttcattgttgttaatattgatgtacttgccttttgaatacttataaatgcaggtgaaaatttatttcccgtgttatcagtattattattattattattattattactattattaccactttcattagctaataatggcatataaattaatgctttagcttgataatataaataatataatgttaattgaatttcatttaaattatcaagtaaatttaaatcttttgaattataaactttatcaattgaaattgatttaggtaaattcattctccaagaatctaataaattttccataattaaacatttattttcattcataattgtttgtttatcaccttcatttcttttaaaaattgaatcaactattgtacctaaaattttagaatatctcattatacttaatgctgaatcactaactttaccaaataatgataattgaatattatccttaaatgtaattaaattaatttcatttgatgatgaatttgttgttgtgtttgatgatgctggtaatgcacattcaatttcataatctttaaataatcttggaacacctaatataaatgcactaaaactatctaatgtataaatacaccaaaataaaattcttctctcaccttgttgtaatttagaaacacttgaaccatttgatcctaaaactgctgctggacatctatgtaatcttaattgttgtgacattgtaatcattttaccccttaatgaataacttgttgttaaatcttctgttgctaaacaatataataattcaattgtaattatttgtaatgaagaaattgatccaattgatgacatattagatttaattaattgtttaattatatgatcataaaaatgtaatatttcataattacctgatttaattgaatcattattaatatcattatcattttcattattattattattattattattattttctttatttttagaaattttaaatgcaacattagccctctctgttgaaatcataactaaacatgttataataactaataattcaccaaatttttcaaatccaatcatttcaccatcatcaaaattactttctctacttttagtaaattttttataatttgtcataaaaatatctttatttaaaatcggtataattgtattccaagtattgaaaaaaattgtaatacaaatatctaaattcatattatttggtaaatttaatgtattaaagaaattttttgattcttccttttttaaattattaaaatcaattccttgaaataaaattggtaataaattatatctctcattttcattatgtgcttgttttaataatgcaattgatctagctgttaaatatggtgctttagaatcaaatccatgagttttaataattctagctaataatgttggtataaataaagtttcctctgttgatcttggtattgaagctgcaataagattggctaaattaaggaaattttttgttcttaatttattttgtaatgaaactgcagctgctgcacctggtgcattaatttgttcaaatgaattaggattataaacaaatctattctttattgtggtattttcattattattttttgattcattattcttagagaatggattaatttgattatttatattcatattattattcatattattagtatcattactatcactaaatggtgaattataaggagaatttaaatgaaatatagaattttgtcttgatctattattaattatattatcaatttcatcatcatcatcagttaaatcacctctatctatatcaactgagccagcaattgaaacgggtctattaataactgaatgatccataccacaattacaattttcatcatgttgatgtaaatctaaagatttttcttgaatatctaatcttgaaacattagctgtatgtaattggaaattactcgtatctcttaaattaggatttttcaaatgtgaatgtgataaatgatcagatgattgattattatcatttagagaattaagttgattttgatttaaatttgttgtatcattactattatcattatctaagagattatttcgtattttggaaaaagtattgatgttatcattattattattattattatttatatcattatttatactattatcagacattgtaattttcattggaattgaaataccatctttattattatcattagaatttaacgttatcaatttctgtaattttttattctcatattcaagttccctaactctttcctctaatgattccgtataccctctagggaaagcttttcttgctaatttatcagtaaagatacattccaaaccaacagctttacaattagcacattgaccttgttgaatttgattattattactatcatcataaaaacatctaatttttttctttctacaacgatcacaggcaacagacactctaacagtacttgaccctggaggcttgatagttttagacttacttgacgatggttgtgccattaatttatgataaccaataaagaacatatatatataaataccccatatataattgaatcaaatgctcagcaaccctaattggaaaaagagtcatttcaaatgcgggtttcgcactataaaaggacaagcttttcctctttttgatttcttctctttattgcttcttcttcatttactgagaacaaccagttgtagaaagtacagtgaggacactatattcttaaactgtgtatggtctcattgtagtactagcaagatgaatgattaactgatgatacccattttttaacaacgaatttcttcacctgaaaattcatgaaagaaaaaaactttgacagagctttttaaccctgatcttcatttcatctttgcttttatactccttctttgtattcttttcttttcttttcactgtaaacttctctattattatggactcacagaatgaaacaccggcagtttgtgataactgtttaggtgataatccttatattgaaatgaagagacttaataatggtagtgaatgtaaaatttgttcaaaaattttcactgttttcaaatggaataataataaatcaaatttaaaaggtactgctaatttaaggaaaacagttatttgttcaacatgttcaaggagtaaaaattgttgtcaatcatgtatgttagatttaacttttggtattgatattgcaacaagggataatttacttaaattagctaaaattgataatttaaatgatcttaatgaacttaatttaaatataactaatgatgttgtatcaaatgctaaaaatattacaagtcgtttgtataattcaagacagttggaatctaaatttaaaaatgataataatggtattaatcatttaattgataatgataattcaatgaaattattagaatcaaaattatctactttagtagagaatagtcccaataataatgatacatctagtaagaaaacttttatacaaaatgttaaattattaccattcaattcaagtcttggtcattttccttcaaataataatgtacgatcattcttcttgtttggtataccgtcttcattatcagagagtcaaatattggattattttaataacttaaaatcatcaactgtttcaatatcattatattcaaaagaaggaaaatttgcatttattgaatttaaatcacgtcaattagctgaaactacagctaataaattgcttacttctaaggataaaaagtataaatcaccactacttattacaattgaaaacaatccaataagagtttgttggtcaagtcgtaataataatgaaataaatttcaatgaagatgaattgaagaaagtttccaatatagttaataaacaaatgattaaattatctaaacaagactatactcctaataataataaggagaaagttacacattctaaaattgcaaagaagaattagccatagtactacactatatcaatataccatgatattcacatcttttatattttttagataatggttcccattgaacaataattctatcacttattggtaatatgagaaaccccgttaaacttaaatcattaactctagctaaactttcaatataaataatctttgtatcacaaacccccaaaaatttacaaataaataataaataagcaattggtattgcagtacctggtccattagttaggaaaacttctggtaatcccctccatttttgataaataatatgattgaaagttgatttaaagctaattaatgtattgattaatgaagataatttatttgatccaatattattagctctatgaattatatcaatttgataatctttattatctgtagtttcttcaagtttttgtaatttatgaattgatgttgaatcacctgaactaataacatattgtctattaaaattgtttaatttatcgccccattgttcaagaattctaatcatttcacctgtatgaccaccagatccaagtaatatcgttaatttagtgtttttaatattattattagtagtaaatggttctttattgaattgtttaacattacatgcaggtaaaactattattaatcttactaatacacatagtaagagtattagaaatgtacttattataacagtgaatgtattttcattcatttactaaaagaaagaagtgtttgtagtagtgcaggttgatattacgtacatgaatattttcaaaggctcttcagatcttgctacaccatttttgtggcaaaaccatgccaacttacgaggaagaacacggactgaacagtacaaataacaatactgagggtgaaagacctaatagattaactgttcaacaagcattaaataattttattaatacaccaactgattcaagaaataacttatcaaattcaataaataatagtatcaacggtataaataatgttgatttcaatttacttaatcaaatgatgaatagtatgaatacaattcttgtagataaaagtaatacaaataatggtgtaagtaatgaatttattgatagattagagagagttaatgtaaaacaattgaaaaatgatgatacatgtccaatttgtacaaatgaatataaggatgattcatatccattagttgttgaattaccatgtaattctaaacatagatttgatttagaatgtattgtaccatggttgaaaataaataaaacatgtccattatgtagaattgatgtaactattaaaaaggaattacctgtattagttgatagtgaagaagaggatgaagattgggaaatgtatggataatattgtgatatgtacagtgtatataaatatataaatttatttagaatcaatattaagcttttcaatatcagattttgacatatgttttgtaaatactggatcttttaataattctaaaactttttgtgaaacaggattattaatatcattatttaatgaatcaattgtatcagataaattatctaatgcaaatttactattttcaatatttttcatttcttcattaaatgttaaattttcataagaatataaattaactttaacaccaaccccccaaactgaatttttctttaaataagataaccagaggtcaataatttcattatttgaatcccaaattttaatcattctaccatgtgtctttctttcaaaattttcctttgattttgcatgaacgaatggtgctcttataactgtccatctctctctctttgttttaattggttttgcaccagttgctggtaaacctaaataataagcagctctaagtgcaaaatcagtgaaaaattcaacatttacaggatcaaaacatttaaatataacttctgcctttaaattaccaaatttaacatcatgttttaatggtgcataataatttaattctgcattaattggtaatggtttatcagcatttggcattataatttcctctgttaatgtttgtgggttataattttgggttaatgtatctataagtttagaagtttctaaagtttcattatctattgaaggtaattcatttgatgataattttaatgataattttaattcagataattcctctaatgctttctctaatgaagaattattattttcattgataagatttttattaaaagagacaatggaagatgaaaaagatcttttcagaggagatgaaatcgatactctcaacagagatgatctaatagcagccagagacatggataatagcagatatattcaaagaaacagacctacttcccctataactagcatatcaaatcgtccaagttgatgaaaagtggtgaaaaattatttaatttgattttattgagtgcacggattttaaaatactttatattatataactgctattacggtcttttaagagaggtatacagggtagaatataggatactatgggtaagagtagtaaggataagagagatttatactatagaaaggccaaggaggaaggttggagagctagaagtgcttttaaactacttcaactaaatgaacaatttgatcttttcaatgatgttaaaagagtagtggatttatgtgcagctccaggttcttggtctcaagtattaagtaaagagatatttaaagataaaaataatagtgatgcaaagatagttgcagttgatttacaaccaatgtcacctattgataatgttattgaattacaggctgatataacacatcctaaaacattagaaatgattatgcatcattttgatggtgaaaaggcagattttgtttgttctgatggtgcacccgatgttacaggtttacatgatttagatgaatatattcaagctcaattaattttaagtgctttacaattagcaacatgtatattgaaaactggtggtaaatttgttgctaaaatttttagaggtagagatattgatttattatatagtcaattaggttaccttttcgataaagttatttgtgctaaaccaagaagttcaagagctagttcattagaagcttttattgtttgtattggttatagaccaagaaatggttggataccttcattaaattcaaatttatcaactgaagaatttttccaagatttgaaaattggtagaaattctcttaataatgaattaaatttagaatttaatgatgaagaaagaattgttgctccatttattgcatgtggtgatcttaattcaattgattcagatgcaacttatgcattagatgaagatgatgataataatataaatatacagataaattcattaagtttagatcctgttcaaagtccaactgctccaccttataagaaagcattagaattgaaaaggaaaggtcaattaaaaattgttaaataaatatctgtatatctgtataataaactaataaactatatataaataaattaattcttaatttcatcacctttaacaactgcatcaggttttaaagttgggaataataaaacttctctgatagtattagaattagttaaaaacattgctaatctatcaataccacaaccccaaccagcagttggtggtaaaccatattctaatgcattacagaaagtttcatcaactaattgagcttcatcatcaccttgtgccttttgatttgcttgttcctcaaatctagctctttgatcaaatggatcatttaattctgtatatgcattacaaatttcctttgttgcaacgaaaatttcaaatctttcacataatccaggaatttttctatcatatttagctaatggtgacataatttgtggatgaccaaatataaaagttggattaattgatgcatcttcaatttctccaactaatttatctaacattcttgcattagttaatggaggtgcacaatcaattttattcttaattaaaatatcttttaaaaatttattaaattcatcagtatggaaagtatcagcagatgggaatttaacatcaaaaattttctctaattcttcaatcatattaactcttttccatggtcttgaaaaatctaattctaaagttttaccttcaggtccttcaggttgatatttaactttataatcaccagtaatttctttaaccatttcactaaataataattcagacatatccattaaatcataaacatctgcatatgcttgataaaattcacatgttgtaaattcaggattatgagtcatatcaataccttcatttctaaattgtctaccaatttcataaactctttctaaaccaccaacaactaattcttttaaatataattcaggtgcaattctcataaacatttccatatctaaatcattatgatgagtaacaaaaggtttagcagttgcaccaccggcaataacatttaaaattggagtttcaacttcaataaaatttcttgaatctaaaaattttctaataaattgaataattttagatcttgcaatgaaaatttctttagttctcttattcataattaaatctaaatatctttttctatatcttgcttcttgatctttaaaaccataatgttcagttggtaacatatgtaaacatggagttaataatttaactttagttgcgaaaactgataattcaccttcaccacctttagatggattagttctacctggataaccttcaacaccaataatatcacctcttcttaataaattatgcatttcagcaaaatcaccatcagcatcttgagcttgtgccataacttgtaaattaataccattaccttgtaaattataaaattttaatttttgacctgcttctctcttaaccataattctacctgcaattgaaactttaacatcctttaaagtttcacctttctttaaatcaccatatttagaaataaattcatcaaattcaattgaaacattaaatttatgtggataaggatttttaggtgaatgatgttcctcttctcttaatttattaacttgtgcacttctaatttcaaaatattgtgcaggattaacattagctaattcatcaacagttttagaaatctttggagctgttgcagctgcattcttagccttttctgctttcttaatttctaaagctcttaatttttgtcttttctttaattcagacttagagacatattcaccagttggttcatccaaataagtctttgctaaagcttcagtgacttgttcaactttatcactcatgatttcgataccctattagaagataaatcaaagaagaaagaattacctataatatccaataaatgactaatgagagaaatttcagtttccaacatgttttctcgtccactgcgaaaaaatttttattttccaaaaattggccagtttttcaccaatttttcatccttatagggttgttgttattgggtgcttttctgtagaggtactgtacacgggaaggataataatggctgagaataccactttagagaatgaaacaccagttgttgattattcaatcaaattgaatgcaagtgttgcattgaaattatctaatttaggcgaaattaatccaactgcaattacaacaggtccaatttatggattttatggtgttgaatcaaatataattaatattacacatactatagcatttccaacttttaataattttagtaattctaatggatttgaagatttctttaatttaaagaatgcaaattctaaatttcaagaaaattatttagaaaaattaagagcaactaataatacagcaaatttattaggttggttcgtttcttcaagtggtggtaaatttatgtctcaatcaattattgaatcattatatcaattacaagaaaattttaaaaataataaaagtgatattccttcaattttaatagtttatgatccattaaaatcaattgaaggttatttaaatttaaaatgttataaattaagtaaatcttttttgaaaactatcacctcagagaataaattcattgcaaagaatttaattgaaaataaattatcatataaaaatatactagaggaagttccagttgttattaaatctaataacttaataaatttgaaaatccaagaatttaacaatattaccacctctgaggatgataacattaatcaattatctattaattctaaaactttcgaaaatataaaatactcatatgatcaattaagtgattcaatcaatcattttaatcataatttaggtaatttaaattatttccaaagaaatttatcaagggatattgctaaaattaataaatgggaaaataaagttaaacaaacaaatgaagaattattaaaatcaaatccaaatgctaaattagaaaatactgattggagaagtgaatttaaattattagcaccttcatcaaaattcgaatatttaatagcaacttctgatgttaataatatttgtaataatttacaatcaattgaaaatattgaattagttaaagcaactggtataaaggaaagtatttaatttagttataagcttatataatatatgtcttatcttaaataacttattaatataataaatgtttgaaattttattgattattgtacaatagaaaaaaaaagagagagattaataatactagtaaatgcaaataaaatggagtaatagtataatctgtaatcaatacaaaccatatcatttactgataactctaactaatgattgaatttccgctttatcaatttcagtaattttactttgtctagctgtttctctttcagcatcctctttagccatggttttatccaaattccaataacaaaataagaaaacaaatgcaaagaatccaccaacagctgaaatacctgtaaatggccaaattaaattaggatctttcattgcaccagaaacaccttcactaatagcacttgaaattgcactattaaataaaaataatgcagtaactaaacctttagcattatctggtgctcttgtgaatgcaatctcataagcagttgtataacagaaacattcacccaaagcacataaaccgtaattgataattgcataccatgctgttaatggagaaggttcaggacaatcagtagcgtagtaaccacatggtgaagtttcatagattctccattgtaaaatagcagagacagcggaagctactgcaccacacataaagccaacaaaaattttataaactggcttaaaattaattttccattttcttaataacggataaacaatataatctaagattggaatagcagcaacaataacaatttgattaaaattattaaagaaatcatttggaatacctttggatgacattgaaccagtttgtgaagttaatgcagaacttaaacctgtatcacttaaattaaaaataatccaaaatgcaaacatagcacattgtgtgaaaacagatttataatcatcaacttcatgcattgtccaatcaatttcagtttgtttccttgcatcttgatataattgacctcttgctttcatgttttcaggatatgcatatgaccaaaattccttattatagagtcttttgaagaaattacctttgaaacaaacaccaaggactcttaaagctttacctaataacgaaccctttggtctttcaggtcttaaatgaggacgaatgaataacattgccataacaacaataatatacataataccaggacaaaggaaagctaaccaataaccaacattccttgcagaatatgaagttgcaatttgtaagaatgcaccaatattaatagcccaataaaaaattaatgttaatgattccattgaaccatctctatcaacataaacggtttcaccatctggcattttctttaaaacattttgtctgtatggatattgatcaagcattaggggtaacaaattagccttaatgaaaccagtacagacggccaatgagataatacctaatgcagttggtgccatagccgcttgaccctttgcaataacaggaggtaatgcagcaataataaataaaatatgtgaaataataccaacccaaacaccaatcatgatagctttaaatctacccaatctagcatctgcaagataaccaccaatcaatggcataacataagctaaaaattgtaataacataactaaagcattagcatcttgtaaacctaaacctaaagcaccggcattaccttcatgacctggcatgactctaccagttgttgaaccatcaggtaatggtctcatgataaagttagtcaagataccttgaacaccataataggaacctctttcagcaaattcaacaactaaaataagcatagctgcaagtgttggtcttgttctaataattctataattaaatttatcctcagcagttgcgacagctaaccccattggattataatcatcagcatattcagcaatatattctctatcagctaattgagatggagaatcagatacaaatccaaaagtatgtgaattatttgtttcatctttttctgattgtgtagtaaattcatttggtgaatctttttcattacttgaacttctatttaaaaagttcatcataataaatattaaacgagtgtttgtcaaaagagagaagtgttaagagaattatgaattaaatggcattaaatggatggaggatataagtaagtttaaatagattatacgaagatgacaaaaatggtatttatggagatagtaaagcaattggagattgtatctatattataagaagtttccccataattctgaattatagaatcaacagaaatcaattataattgtaaagcagaatatgataattaattttataaaatcataatttcataccataaaatataatacttgcacaacttatatagcaattgcaagaatttgattttagggatacctcctactacctttattaaatgactttaacaggcaaactttaatgatttttccttatctgattgttaaatgatttcaagggttttgtaattcttactgttgccgtataactaactaatatattgtatcacagcataaactggtaatagaaacatagcataaaaccacatagcgcaaattaattttaaagggttctttttctactttatcagaattataaataatgagatgacttcttatcttattgtattcgtaaaattaagggttttaagaataatattatagtagattacgataacaatgttattgccttagcaaattattgtggagattgtggattaaataaaattggtaagcggaagcgatgtaaatggtagttagttagattgcatagtgtaattaagttaaaacgattggagccgtacacaagtaaggacattgacgtttgtggagtttgtccacagtggcacaactcatattatttaatgtaaatcgatgtaaaattgcgtatgaaaatgtaataatagttaatataaaatatttgaaaaaatgtacctatagaaaagcatagttaaaatattaaacattgaatttatttactgatgactctaactaatgattgaatttcaactttatcaagttcagtgattttactttgtctagctgcttctctctcttcctcttcctttgccattgttttatctaagttccagtaaagaactaaaaagaggaatgcacagaaaccaccagctgctgcaatacctgtaaatggccaaatcaaatttggatcaactaatgcaccggagacaccttcactaatagcacttgaaattgcactattaaataaaaataatgcagtgactaaacctttagcattatctggagctctagtatatgcaatttcataagctgttgtataacagaaacattcacccaaagcacataaaccgtaattaataattgccaaccaagcagttaatggagatggttcaggacaatcagtagcatagtaaccacatggtgatgttttgtaaattctccattgtaaaattgcagagacaccggaagctgtagcaccaagcatgaaaccaacgaagattttataaactggtttgaaattaattttccattttcttaataatggataaacaatataatctaagactggaattgcaacaacaataacaatttgattgaaattattaaaaaaatcatttggaatacctttggatgtcatagcacccgcttgtgcagttaatgttgaacctaaaccggaatcactcaaattaaagataacccagaatgagaacataacacattgtgtgaaaacagatttataatcatcaacttcttgagcagtccaatcaattggagtttgtttttttttattttggtataattgacctctcttttccatattttcaggataagcatatgaccaaaattccttattccaaattcttttgaaaaaattacccttgagacaaacaaaaacaactcttaaagctttacctaataacgaaccctttggtcttttaggtcttaaatgaggacgaatgagtaacattgcaataacaacaataagatacataatacaaggacaaaggaaagctaaccagtagccaacatctcttgcggaatacgatgttgcaatttgtaagaatgcaccaatattaatagcccaataaaaaattaatgttaatgattccattgaaccatctctatcaacataaacggtttcaccatctggcattttctttaaaacattttgtctgtatggatattgatcaagcattaggggtaacaaattagccttaatgaaaccagtacagacggccaatgagataatacctaatgcagttggtgccatagccgcttgaccctttgcaataacaggaggtaatgcagcaataataaataaaatatgtgaaataataccaacccaaacaccaatcatgatagctttaaatctacccaatctagcatctgcaagataaccaccaatcaatggcataacataagctaaaaattgtaataacataactaaagcattagcatcttgtaaacctaaacctaaagcaccggcattaccttcatgacctggcatgactctaccagttgttgaaccatcaggtaatggtctcatgataaagttagtcaagataccttgaacaccataataggaacctctttcagcaaattcaacaactaaaataagcatagctgcaagtgttggtcttgttctaataattctataattaaatttatcctcagcagttgcgacagctaaccccattggattataatcatcagcatattcagcaatatattctctatcagctaattgagatggagaatcagatacaaatccataagtttcatcaatatcatttttttcagattttgtagtatattcatttggtgaatctttttcattacttgaacttctatttaaaaagttcaacatagtagaagggttttaatgtttgttgttagatgaagagggagggaagaaataaagagaataaaagatgtggcattggaaatatgggggggaaataagaggatttaaatagaatttaaataaatataatgaaagatagagaacattaaaaggggggagcagtatgataacagaaatggaagttttaagaatgggagagattaattaagataagtgtggattgaaatagtagaaagggatcaaagttgggaaagttgaagggaaaaaaagataagaataagttttgataagattaatataaattatgaatgtatagtaagtcaagataactaaatataaattacaagaacttaagattaagatattcatgctatcatagtataatttatacattgccgcgtaaattttaataagtggaatattattattattatttactcagtggaactggctgtagcgtagtattagtattattatagttattataggacatagtatgttattatattgataactagtgtatttactatgtatttactatgtatttagtgaatattacaatattacagtattacagtacaaaaatccggtaattgaaattttaagggttcaccgaccttaagggtccagtgaccaatgggatgcgatggagatgagatgagatgagattatactagtattgtgttaagcttagttaagggtcatactgtggagagatctactcatagcgtaatattaatttggggcacaagataagacgttgtgtaaagtaaggcaataatatcaataatcaatggagccgtaccatggtaaggaccgttgttatctaatatctataataataaatagttttattactataaaagcacgtgaagttgcgcatttttttcatttggttttcattatggtcaagatagggtaatagacagtcgggggattcgaaatggtgtttggtttattatgctaaagccatttaggtaaatggcttcatttctcataggaaggtactactatatataatatataaaaagaggaggaacgatgaatgccctaattttgacaagacccttaaattttactacagtgatgtatatatatatacaatttcaatatatactcatagtaataattaactactaattaataataataataatagataatacatcacactacagtaacggaacaacgagtaccatcatcaataagataaagtaagaatgggctgtacatccccataataacgttattaattgaaataacggcatgatcggagtttccagtgaaaaaaaattttatttctttttttcaaaggcattgattgacacattatattgacagaacttatcgtttctttttattattccgatgattcattactgttattggatcagaactctggataaactgtggtcaatgtggtcattttggtcattttggttattgtgttggattcccgtttaatttccttatttaattcactctaatgtcctttctttttttctattttgtattctaataatacttcttttcttctgaactcttagttttaattttaaaaatttatttcaatttcatctcactaaactatccaaaatgttatccaaattaacggatagattctcctcaaagaaaaattctacagagaaacatcaatttattgatgaagctaataatgttataatagattcagataatgaacatattaataatgttgaaaaaattaaattatcaaataataataatattgaaagtaaagattcagattcagattcttttaaaaaacatcttgttgatgatatagattatcaaattttagataatcgtgaatatattccagaatatgctgatgaatataatccaatgggattagctgttgcaactgctgaggataaatttaattatagacttattagaacaaaaccaacacttgcagctatgttgattttagttgttgaatttgctgagagaggttcatattatggtgttcaaggtattttaacaaatttcattatgagaccattacctgatggttcaacaactggtaaggttttaaagggtcataccggtaatgctggtgctttaggtttaggtttacaagatgctaatgctttggttatgttattacaatttttggcttatgttatgccattgatcggtggttatcttgcagatgctaaattgggtagattcaaggctattatgattggtgtttgggttggtattatttcacatattcttttcattattgctgcattaccacctgttattgcaaaaggtcaagcggctatggcaccaactgcattaggtattatttcattagctgtttgtactggtttcattaaggctaatttgttacccctcatgcttgatcaatacccttacagacaaaacgtcttgaaaaagatgccagatggtgaaaccgtttatgttgatagagatggttcaatggaaactttaactatgattttctattgggctattaatattggtgcattcttacaaattgcaacttcatattccgcaagagatgttggttattggttagctttcctttgtcctggtattatgtatattattgttgttattgcaatgttatttattcgtccaaacttaaaacctgaaagaccaaagggttcattattaggtaaagctttaagagttgttcgtgtttgtctcaagggtaattttgtcaagagaatttggaataaacaattttgggcttatgcttatcctgaaaatatggaagcaagaggtcaattatatcaaaatacaaagaaacaaactccaattgattggactgctcaagaagttgatgattataagtcagtttttacacaatgtgttatgttctcattctgggttatcttcaacttgagtgataccggtttaggttcaacattaactgcacaagcgggtgcaatgacatccaaaggtattccaaatgatttttttaacaatttcaatcaaattgtcattgttgttgcaattccagtcttagattatggtctttatccattattaagaaaatggaaaattaattttaagcctgtttacaagatcttcgttggtttcatgcttggtgcattagcttctgccgtctctgctattttacaatggagaatctatgaaacatcaccatgtggttactacgctactgattgttctgaaccttctccattaacagcatggtatgttattattaattacggtttatgtgctttgggtgaatgtttctgttatacaactgcttatgaaattgcatatactagagcaccagataatgctaaaggtttagtcactgcattatttttgtttaatagtgcaatttcaagtgctattagtgaaggtgtctccggtgcattagttgatccaaatttaatttggccatttacaggtattgcagcagctggtggtttttgtgcattcgttttcttattctgttattggaacattgataaagttatggctaaggaagaagcagagagagaagcagctagacaagaaaaagatttaaaaccaattgcttcaattcgtagtgaaactgtaccttttgatgttaatgatgaatttgaattacgttcagcaattcaatcacttcattaataatttcttttcttttttttaatttataggtatgtagcacctatattatatattacattgtatatttacttgaatgaataaattatgattatgaaattatgatataaaatggacccttatagaaaccgcgttaacaatttacatgttaatcatgattttgttgcacttggtctttcttatgagggagtaaatgtcacaattagaacttgaggagtatgcaaaccttctcaaagaagatttagtatctattgggaaactaaatactgttgaaaaatctattcatttaagggaaatttcaaaaccattacttcataaattatttcaagtacttggtaatggagatggtgaagatgaagataataatgtagacatatcgacaatttgtcattatttaatggaatatcttgtatttgatgatgatttatcagttgaggcaacaatgggattatacaggataaaacaatttaataaaagtttcaatattgcaataactgaaaacattaataatcttattgatttacaggagactaaatatgaaaaatataaaattttcataattttaacaaatattttcacaattgattcatttttagcaagtgaaattttcactaagaatcaatcatttataagtttattaactaatgaaataacttttattaatgatgaaattgaatcattgaataatttacaatcaattaaaaatattaataaattattaaaattattttcaaatgcatgtattgatgaaatgtcaagatcaattattgcaactgtttacatcaatttaatcattaaatgtttaagattatcaaataatattgaaagtcatttacaaactaaatgttatgcagctacaataactattaaactttggagattaattaaacctgaagtcttggaagataattcaactttattatcattaaataacttacttgaaatcattttattaagtataaaattggaattatttacatcaattgaaggattatcattattagttactaatattcaaataagggggaaaataaggaataatgatgaacttttgaatacattatttaaattattgaataatcatcatcatacgacatatggtataatttcaattttatcatttttaacaatacctaatagaatcttgaaaattcaacaatcttcaatgatgaatttaaaagattctaatagtataagtaattatgatatttatacaaatgctaaaataaacaattcaaagaagttcgatgatattaatgatattaaattacttattgataaacttgttaagattaaatttttctcacaaaatatggttaaaatctttaaatcaattgaatcctctaaaggattaattggtgaatgtctaaaattaatgaataatgttattttccctgatattgttataaatgaaaatgaaacaattgataatataaatcaaaattatattgttgaaataaaacaaattattaaacttttaacaacttatttaataggtacatcacaaaacattaaatataatcataaaacatttattcatttaactgatgaaattaatcaattatcagagaaagatttagaatatagattattagcaattaaatcattatcaagtccgaaaattagtgaaatggttgatttattatttgatgatgaaaataaggatgaagaaattactttatctattgcattattcttgcttgaaattatagttcaagcagatattgataatggtactgcattaactgatatcgaaacaccatttagtaatttaaagaaaaatggacaagttttcacatcatttgatatttattacgcatatattggattatctgccatttgttcattaaattttaataaaataaatgaaactgttttcttatttggttttaaatcaattattaatatgattacttcagataatgataaattgcaattttcttcattaaaattattaaatgaaatttgtttattaccattatgtattgcaaaattatttaattggagttcaatgaataataatgatgaaaatttccaaaattttaaaattttaaattatttaattaattcaaataatattgattcacaaatttgtgtattacaaatatttgcaaaagtttcaaattattcaatagtttctgaaaaacttatttcaaatgaaaaattttgtaataatttaaatgatgtgttagttaatcaatatcaattagatgaattgatatattatagtttggatatattatcaaacttattccaatcaaactcatccacatcatatttatcagttttcaaaaactcaaagaatagtattttacaatttcaaaaaagtgataatgaacaaataagggagtctgtaaacagtatagcaaaatatttataatttatattaattatttattcaaatttagatataaaactagttgtttgtggatttaccttaagttcaccaattttttcatttggtaatgcagtctgtacaaatcctttaataggtatattaaataatgatctatatgaattcctgtcaagatttttatactccttcaaataaaattcctttaatgattgaaattccttaaataattctgaattttcattatttaattcatcaattgatatattttcaagtttatgtttatatttattaataactttatgagatgatatgaattcttcatcatagaataatggttcatttttaaattttgtagaaatatgatctttatctgttagttcaatatccataatttctaaatattctcttcttggtaaacatttatcaagagctaggaatttggtggttttactggaaattataggttcgataggtgtggtggtatcttcgtttgagtcttttcctatttcatcagtgttagtcgtatcataacaacatatatctaattctatttcatcttggttcttatcttttgcatccacacttatttctaactctatctcctcttcatttttcttatcatctaaacttatatctaattctatttcatcttcattcttctgatctaccttaactttcttactttccaaagttacctcatcctcattagtgattcgtttcttttcattagccttatcatctccccattttaacatagcagtaaatttaacatgtaaatgtgcactaaaccaataacttggttgaattttctttaataagttcatattaaatggacttccaagttcaccctttttaatatctgacttaaagaaaggttttttctccaataatctatccttattaccataattatagataccttcaggccaatcgtgggataacataatcatcttaggagaaacatttaataattttaatttaatataatcttccattgaataatgataaattgaacgtatatttgacctttgtaatgggaattgataattatttggtcttaatttaagaaaatcaggtaaccaataaacacctgaaattccaccaattcttaaacctttataccaaattactgatgatctacccatatagaaaatatttggagcaacaaatccaccaaattttaattcctctaaataatttgatgattcatgattaccaccaatgaaaattgtcattattggtgcttttttcttaagtgtataataatcttggaaatctcccattgatttatatttatcaggtacactcattgattgtaaatctgctttatttctaatactttggaaatctccacaaataatcaataattccactttcttcttattcaatcgtttatagatttgatccaaacatccatgacagcatccctctattgccaccttcatcccctgtcaaataatgtcataaatatcttaaatactctaacatctattacgatatcaggcctacaatctatatatgagaccctcaataagataatttttcagttgaaatttttttatttaatttttttttcatgaagattttttcctttggtttttatttcttgttgtatttcccttggtagatcaagtgaagacatggctgcacagttgaaaagtggtaagagaaaggctgagagcttgagtgctaaggctagtaaaaaaagtaaaccttcaaaacattcagaagaggaattatcatccgaacaatcaagtgaagatgaaagtgaaaaggatgatgaatctgaatctgaggaagaatctgaagatgatttagatgaattagacaagatggacgaagatgatgatgctaatgatattgaagatgaagataatgaagacaatgatgatgaatcatctgataaatatgacgatcctgataagaaaacttcaaaggaacaacatgaagaacaaagaaaacttttaaaggaaagaaagaataagagaaaatcaggtgtagaagttgaaagaattaaaaagttatgggaaagattaagagtgaaaaatcctccattaccaaaggaagttagagataaattagctaatgaaacctggtctctttgtgaaggtgtccttggtgatttagttatgaaacatgatgcatcaagagttgttcaaacattagttaaatattcctcaaaggaaagaagagatttaatatgtaaagaattaaaaccatattattataaattagcaacatctgcatatggtaaatatttattagttaaattacttcattatggatcaaaagattcaagagctttaattattaaaggtttacatggtaaattaagaaaattaatgagacatagagaaggagcatatgttgttgaagatttatttgttttatatgcaactactcaacaaaggaatcaaatgattagagaattttggggttcacaatatgcatattttacagatgaaaatgataagagaacaattgctgaagtttgtgcagaatctgaagagaagaagaaattaatttcaggtaatttacttggtactattaaagcatcaattgagaaaggttcaattggatttcaaattttacatgctgcaatgaaagaatttgttcaaattatggaaggtgaagatatgaaagaatttattgaagcagttactgaacaatttgcatcattagtacatacaccagaaggttgtgaagttgcatgtacagttttagcaagagcaactgcaaaggaaagaaaattattattaagaagtttaaaggaacatgcagaaaaattagcaactaatgaacatggtcaaacagttttacaaattatctttatgacaactgatgatactgttttagttcaaaaagttttcttttcagaatattctgaacatatggaaaatgttttaactaataaatattcaagaagaccatttatttatttattaaatggtttagataaagcatatttttcaccaaatgttttaaaagatattgaaaaatatattgaactctctaaggaaacatctaaaaagccagaagaagaaagaagaaatcaaattttaaagattttcttaccagtattttataaaacattattagaaaatccatatgatttattaaaggaaaatataggtgcacaatttgttcaagaattattatataatactacattcccagaaatcagtgatgaattaagaattaaatcaattgatacaattattgattgtgttagaggagatttaactaaggaagatcatcttattaacaaggcatatacaccaagattattaaaatctttaattcaaggtggtaaatggaatagagaaactaaaactattgatgaagttgaaaatatcaatttaggattatcatttgcaattaaatttgttgaagaaatatttgataatggtaaagatgttgatgttttagagagctggatttctaataaggagagtagttttgtattagttgcattaactgataaatttaaacaatatccaaaggataagattggaatggaatttattaatgcattaaagaaacaaaataaattcatcaaaaagcaagatgaatcaaataagggtgcaagtttactctataaagttttaaactagttatatatatgatatatgatatataaactctgtgtagatactgtaattaaagatacaattaaataacattgcctaaaagggtaataaatagctactctttgtggaagtcgcgtcgattgcgtaatacaaaatgaaatatacctaggaatcccattttcaatataatgattattgccaccctgaggtgtaggttcttttcatttaagttataagaggtttataattacaagggcaaatagatataaatcaggaaacatatatagatacacataatggcacctaatgaaaactgggagaaatttaagaaaccaattgatgatgttgaagatgataaaaatatagagatcaaaccattaagtgaagatgatattcaagttttgaaaacttatagtgcagctccatatagtaattctattaaatcaatagagaaagatttaaaggatttagagaataaaattaaggaaaaaatgggtattgaagagagtgatacaggtttatcaaatccaaatctttgggatgttgcagcagatcgtaaaagaatgaatgatgaacaaccattacaagttgcaagatgtactaaaattattaaatctgatgatgtagaggatacagaagaaattgatgaaaaatctaaatatgttattaatattaaacaaattgcaaaatttgttgtaggtttaggtgaaagagtttcaccaactgatattgaagaaggtatgagagttggagttgatagatcaaaatatgaaattcaattacctttaccaccaagaattgatccaactgttacaatgatgacagttgaggaaaaacctgatgttacatatagtgatgttggaggttgtaaagaacaaattgaaaaattaagggaagttgttgaattaccacttttatcacctgaaagatttgttaaattaggtattgatcctccaaagggtatattattatatggacctccaggtactggtaaaactttatgtgcaagagctgttgcaaatagaactgatgcaacttttattagagttattggatctgaattagttcaaaaatatgttggtgaaggtgctagaatggttagagaattatttgaaatggctagaacaaagaaagcatgtattatatttttcgatgaagttgatgcaattggtggtgctagatttgatgatggtgcaggtggtgataatgaagttcaaagaacaatgttggaattaattactcaattagatggttttgatccaagaggtaatattaaagttatgtttgcaactaatagacctaatacattagatcctgcattattaagacctggtagaattgatagaaaagttgaattttcattacctgatttagaaggtagagcaaatattttcaaaattcatgcaaaatcaatgtcatgtgagagagatattagatgggaattaatttctagaatgtgtccaaatgcaacaggtgcagaattaagatctgtttgtacagaagctggtatgtttgcaattagagctagaaggaaagttgcaactgaaaaggactttttagatgctgttgagaaagttattaagggtaatatgaaattctcttcaacaagtaggtatatgcaatataattagtaaagtaatatctactatcttataatataatctatagttttaatataatttaattaatgtacacaatgagttttttttttataaaataaaataaagtaaaataaagttactattattcccaccaactacaacaacccataccatcagtttgacaagatgcaattaatgcataaggaggagtttgttccttttgttgaccatcatcatcctttttaatattatcattatttaatggacctttaggtttaacattagtgaaaatttcttcttcaattctaaaataaattttttcattaacatcaagataaagtgttgtatcatcatccattttccaaatccaagcattttcatcaattgagaatgaactattttcaaataataatgcctttggtatgaaaatatcattaaaaaatccaatattaatttttataccatcaattgtacatttttcaatccaaccagttataatttctccaataaatggtttaaaaattaataatctacaagtaacttgaatatacattgcaccatctcctggtttaaataaacctgaatcatattcaattatatcataaactgaaattgctaaacctaattttggtataattttatttgaatgtttaacatttaattcttgctttattgcaatttctcttggtaaattaaataaatgtggtggaattcgtattaaatcagatattaatgataattgaaacatcgtttatgtttaggaagtgttgtagtgtataattctactatggaaaacttcttcagatccatcatccaattgatcttcaaaatattttttttttctattgagaaatttttcttaggtatatcataattttaattacagttactttaagttttttaatgaataataaatagattatatgtgtatttataaataaagagtattattattactacttaataaagacataaaactcataatactaaaaaaaggtaggggggttatcgaaaaaataaaaacatgaattaaattataattaaattataatgacaggaaactcttaataagctctaacagttggtggaactggtttacattcagcttcatctaaagtatgagtaataacttttctgtaatctaatttaacaggttcattagtatttgtttgccatgataaagtatgtttttgccagttagtatcatctctttcagggaaatcatctcttgcatgagcacctcttgattcttttctagcagctgctgataaagaaatttgtcttgcacaagttaataaattttgtaattctaaagtttcagttaaatcagtattccaaatcattgatctatcagttgttttaatatcattaaatttttgttcaattttttctaattcagaaacacctgcatctaaattatcttgagttctgaaaactgcaacatgtttttgcattgccttttgcatttctaatcttaaatcagcagttgaagtattaccatttgcatttcttaaattatctaaatttttaattgattcaaaaccaatatctgcaggtaattctttatgtggcataccaggtttaatttcatttgcaattgtatgagcaacagctctaccgaaaacgactaaatctaataatgaattagcacctaatctattagcaccatgaactgaagcacaagcagcttcaccacatgcatataaaccaggaataacaacatcttcacccttttcattaattgttaaagcttcaccactccatttagttggaataccacccatattataatgaacagttggtataattggaattggttctttagtaacatcaacaccagcgaaaattctagcagtttcagagataccaggtaatctttcctttaaaacagaagcaggtaaatgagataattgtaagaacatatgatctttatgaggaccaacacctctacctgcattaatttccattgtaatagctcttgagacaacatctctacaagctaaatcttttgcatgaggagcatatctttccataaatctttcaccttcactattaattaaataaccaccttcacctctagcaccttcagtaattaaacaacctgaaccataaataccagaaggatggaattgaataaattccatatcttctaatggataaccagctcttgaaaccattgcagtaccatcacctgtacaagtatgagcagaagtacaagagaaataagctctacctgaaccaccagttgcaataattgttttatgagctttaaatctatgtaaagtaccatcttcttgattataagctatacaaccaacaatttcatcattatgttttaataaatctaaagcgaaaaattcaataaaataatgagtatcatatcttaaagattgaccatataatgtatgtaataatgcatgaccagttctatcagcaactgcacaagttctataagcttgaccacctttaccgaaatctttagtttgaccaccgaaagctctttgataaattttaccttctttagttcttgagaatggtaaaccataatgttctaattcaataattgaaggtggtgcctctctagtcatataatgaattgcatcttgatcacctaaccaatcagaacctttaacggtatcatacatatgccaatgccaatcatctttatgcatattacctaaagcggcattaataccaccttgagctgcaacagtatgagatctagttgggaataattttgaaatacaagcaactttaaaaccttctttaactaaaccgaaagcagctcttaaacctgcaccacctgcaccaatgacaacacaatcatattcatgatcaattatatgatattcttttgacattgaaacagctgcttctttaccatttaaattattaaatttatttataacttgaaggtttttatttgtttgagagaaatatctcttacttgaagaagtagttgatgaagtaactgattttatacttctttgtaatgaaagcataatggatagttgattgataaatgaaatgaaggaataaaaagcaaatgataatataaatctacaaaataaattacaaataccccagaatatccaccaattaatcaactacactacaattgcgactcgggaaagtgaataaatgcaattttcgtccaattgaatttccattattaataagtagtgagaaatttataaatttttataaatggccggatatattgatatgtctttccgtgtttgttacgtaatgtaattgttgattatgtaatgtaatttgttgattatgtaatcatagtcgcgtctgtctgtaattatgtcatcgtttataccgacgcatcgactgtttccttacgtcagcctagtctttacctaatcttataaccattacagttacattatctgttgtaccattacttatagcataatctaccaatactttacttgcatcatttacatcttcaatacctttgattaattcaattgccttatcatcttcacatacatcccataatccatcacatccaattataatctctttatccatatctggtattatttcaatcattgtagtaaatggtttacctatgacaaattctttaacatatttatcacctaatgatcttgtaactgctaatataccattaactctattaccaattataattcctccattttcttcaattcttcttctttcatttaaatcatttcctttatgttcataacttaatctaattgctttaccatttctatttaatattattctagaatctccaacattggctgtatataatatccttttatgtttattataatcaatatgatcattatcattaggagtttcttcttctccctcaccttctccctcaccctcaatctcttcctcccatcttaaaactgcaactgcggctgtacatccactattaccaataccttcctcatctcctatcaattcatctgccttttggaaacttttatttaaattatcccttaaatctccaaatttatcattaattatactttcaaataataaattatgtaaattactaccacaccatcttgatgtttgctttcctgcatgtccatcgaaaattgcaaaatacccccaatctaatctatcacaaaaatttgatacatatgtatgaacatcttccatactacgtctatatttactattcttattctcactaactccaactttaaatgttaatccttcacatggatctgtggtagtgtctgttatttttaaatctttaatgtctttaatatctaacttcacttcattatcattatcctctcctttactattcctacgtgttaaatcaactgaatgtcgttttaagaaactcttcatactcttgttaaataagaaaatacctaattgaaactttccagtcccttacataacaaattattttctattttaatattaaatattacgtaagttttgacctcttacattacattacattacagtagaatatttactttatattaagattgtacttatttaaatacataaactacatgtataaaccttcaagattttcttcaattttattctttaaaactctttcctttgcttgtttaaaatcttcaaatttaacttgcattcttctctctcttaatgctaataatcccgcctctgtacatattgccttaatatctgcaccacttaaatcatcctttgaattaacaatttcatctaaattaacatcatttgacatattcattttacttgtatgaatttgtaaaattttcttctttgttgatgcatcaggattttcaaataatatctttctatcaattctacctggtctaattaatgcaggatctaaactttcaattttatttgttgccattataactttaacatcacctctatcatcaaaaccatctaattgatttaataattctaacattgttctttgaacttccctttcacctcctgatgttgaatcataacgttttgtaccaattgcatcaatttcatcaatgaaaactattgatggtgcattctcacttgcaactttaaataattgtctacataatcttggtccatcacctaaatatttttgaattaattcactaccaacaattcttaagaaagttgcacttgtttgatttgcaactgctttagctaataatgttttaccagtacctggtgctccatataatataacacctttaggtggtttaatacccatttcttcatataattcaggatgtgttaatggtaattcaacactttccttaatttcttgaatttgactctctaaacctccaatatcactatatgattcagttggtgatttatcaactttcattacattaatcattggatctgcttcatcctgtaatgcaccaactatactaacagttttatgatgtaataaaacttgacatccaggttctaataatgatttatcaacaaatgataaaattgaaacataatattcaggtccactacttgatgaaacaattgcatgatcatcatcaattatttcctctaatgtaccaattgacattggtgaacctctaatttcatcaattttctctctttcttcaaattgcctctcattagttggttgtaataattcttgattaataacaaattcttcttcaagtaataaatgatcctttatcctctctaatcttaataattttaatttacatctcgtattgggtaatacattaggtaattttgcattcttatcactaccatttttacctttctttctaccaaatgatctagtttgtgcaggtggttcatactttggtttctccttcttcttatctactcccttctttttcccttgacctggtgttgatgcgtcttgtcccattgtggttgtgtactgaatgaaaagaaatgaaataaaccaaaagaaaagaacttaaagaaactttgccactcaaagtgaatcttccatgtacgtaatgttaaataatgagaattgaaatttcaaatatcaaaaattatttcacagtctgtctacatgtgtttttactctttatttaggacgggatatctatacaatgacaagtatacaggatccaacggggacatatgttcaactatcgaaaccgtattttacattggatgaaattgattttatgataaacaataataaagacctttcacataatattaaaaattttaaacaaaaatcaagagatgtatttcaagttttaattaaattaataattaaacttaaattacctattaaaatactacaaaattcaagttatttctatcaaaagttttacatattgaataataattataaaaaatattcaaatttacattttgaagttggattagcttgtcttttcatttctttgaagttaaatgattttataaagaaaattaatgttgttataagtgaagctttatcaattaaggaattttatttgacaaataatgatgttgaagataataagaaaataattataagtttagaacgtaaaatactggaatttcaaagttttgattttagaaatttcttaattgaagattatttaataaagtttttaaaatactataatgaaagtacggaaagtaaaagtacatctgacttactgggatatttaagttggtcattattgaatgatttatacctaacatcattgattttacaatatcctgctcattataatgctataatatgtattaaagcatcaacattattattaaatgaattgaaatctgatattaatttaaatattgattttaaaaaatcattccccatgattatggatattgattcatttaatataaatggtgttaatcaattatttggttatataattgataaccttggtataacatttttcaaatcttcattaaaggaattaaatattataattgatgataaaaaattaactgatttattaattaatataaagattgaacttaataatcaaataaagagtacggataaacaaacaaatagattagataaagatttattctttcaaccaagaaatacagatatagctaaaaatggtagtttaagatttttatataataaacaaacttatcttagggaaattgatgataaaaatatcattccttagattatatgtttaattctatatacctgttccttttcattggatcaattttttgtaaaatagttagataattattaaattcatctaagttcactaataacttatcgattttgtataattgtttcattaaataaacaattgatattaaacaccatttattatcattaccattttcattatcttcgatttctaattcatttaattctttaatatcattaattaatttagttattatatcaattttttcatcattttcaattttattaagaaaatattcacttataagccatttcatataaaaccaaactgatgaatcatcgggatctgtataaattgcagttttaaataattcaagttctttaattaggaactgatttatatctttattattaaatattaataaatattgaaataatttttcatcacctacatcatctttcgataatactggtgatttattaaataacatttcaattaattttgatctattatgccatgcagaataattggaaatatctttatttatcatacttgttgtaaatttaaattcttcaaaatcaattatatcactatctttacttatatctttcatacatttaattataaatcttctataagaccaaacatggaaatttcttgaatcaactgttaaaaattgtttaataagttttaattcattttcccaatcacttaaattatctaatttcaaacaccaaattctatgattccaaatccaataagatttagggaatttctttaattgtttaagtacaaaatataattcattctccaatatttcatgtttatttatttcattcataccatctatttcattaattaaatattctttacgataattccaaacagtgtataattcaggattaatttctaataatttagtaattaattcaaatgattgtttattatatattttattcaatttactatttaatactaattcattcaattccttatatttgtcaacttttggtctctctatttccatccttttcaatgcttcactttctgaaagtttagctgatttctccctaccatgctataaataatgttagtattttaattcttattgtattaatttaattatttaatttaattatttcaacatactatactttcaaatgaactgttctgactgtatcctcttacaaatgacattctaaattgtaattgcacttgttatccaacaagaagataagtagtgtctttactttaaagaagacattacattaattacgtaacaataatttccatcatcaaccataatacttccttccattctttcttttgaacaaggatgaacaactctaataatacagttgaaatcaatggttcaagtaagattgtctctgattattttgaaatttgtattcataatatccttttccaaagaaagatttattcaagggatcaatttaaagtaattagaaaatttggtttaaatgttgtatattctaataatcctgaaattgttaattatataaaattaattattaaacaattaaataattggatatttaatcaatcaattaattggcttactctattaatagtatcaaaggaagatgattcaattacagaaaaatggatgtttcatatagatattaataataattataataataataataatacaaatactacgactactactactataaaatcattagaaactatccaattggaaattcaatcaattattaaacaaataagttcatcaattacttttttacctgttttaacaactcctcaaacttttaaaatacttgttcatacaattggtgatataaaatcaaataataattgggatgatgctaaattttttaaagaaattgatgaaaatgaatcagagagtgttgaatataataatttaacaacaaataatcataaaatttcaacttatgttacttataaaacaatcgattaattgatataatatggtattatactagctatgaaaggaaagaattgaattacttattggagattaatcaattcattaggtggattatcccaatcaatatcaagtttaatcttagtattggtatttaaatgacttgttaaaagttcatgaatatcagttttaagaatacctgttttcaaatcaactaaatcttcaactcttaatattaatgtttgattattatctgatggtgatgataatgttaataaattatcactaaacattttctcctctttatcatcatttaatattaaattttcaagattcttataaacttcaggtaaatgagatatatcaacatttttaataaatttaatcctccaaagtaatgaccaatgaacttttgcatttttaggtacatttctcttttcaccaaaatttggccaataaattggtctccatttaccatctttattctcaattctatatcctattggtataatttctaaaatccaccaaaataatgtattaataaaacttgaatctccatgtcctttaaatgtatcaattttattaaattcatctcttaaatcaggttttgaaatatatttagaaaaatcagggaataatgaacttttaatgttgattctgttctttttctttctgtcatgtgtttcattaggattactattaagattggtattaatatcattttcatcattatcattatcattatcattatcatgcttttgattttcttcatcgtaaatatttttagccatacaataaggacttatatatgaaggatatttatgacctttaaatgaaagtgtatcatgttgaaatgtcaatgctgaatttaaggaggtaaattttaaattaaattcatccaatgcatttgatttgaattgtacaccatattttaaagcaaatgataaaatccatctaagtggtaattttgaaattttattaccattatcatcatagggccaacaacctccaatatctgaatgatcacctgggaaccaaacttccaatatatcccttgaacatcttttagagaattgaacagaaacatcatgagatcttgttacattatcatcatcaggcatttcaatttgtgatattaatgatatgttatcattatcattatctatattttcactttgacaatcccttgtaatttcattatttgtaagaaaagaaggtaaataactatgtaaacgaaataaattttgtttaaattttgatcttctttcatgaatactaacagcatgacgaatatgattaacatttgaagtatttgaagtataagggaataatttatcaataaatataccacaagaattaattgaatcaaataatcccataaattcaattgaaacattatatctacaaaaagtttgtttgaataattgtaatgaataagtacaatacaatggattattattattacttttatcaggttgaccacattgttcccaatttttataaatttcccaagcagttttaaccataccatctaatccattatccaataaaccaattttttcaatcataccagctaatattctagcaatgaaagaacctctactaaatccgaataaataaattttatcaccttgtttaaaagttttaattaaatattgataagcttgaattacatgataatcaattgaaatagcaattgcactatcaattgaatttttaaatgatgattggaaagatgaattttgaaatgaattttgtgatatatcaatatcaataccaataccagctatattacaggttagtatatgtctacgagatgataattacattacattacactacatacgttgatagaaacaatgctgattaattgaatttttctctaacattttgtacaattccatgatattagaaggatccttagacccgaaggtattgtcggtgccatcaaagcacattataatgttgtcggacattgtcaaaagaaagcaaagaaagaagtaaagtcaaaaagaagcaaacaatgcaaaacggcttaagaaaaggggaaataaagtcggcccgaaaaaatgagatgtgcttatcgtcttggattttattttttctattatctttatcttattatcttattatcttctttcttttgatcatttattattttattatctggcctatcatcttgtaaacagtaagtgatgatatctataattaacgccgtttaattgaattaggggttttaatttaatattattatccccgagttttgtataaattgaaacctatttcctttcttttttttaaaatctttgtctaataaaattttttcttagattaaataacaatcaatcaatcatatatcaaacaatatgccaggtttatctattccattacctcaaggtgctggctatgcaattattgttggtttaggtatggttttctcccttgggatgatcttaactacttttatcttacgtcgttatcaaaaggaaattattacttcggaagaattttcaactgctggtagaagtgttaaaactggtttaattgcagctgcagttgtctcatcttggacttgggctgcaactttattacaatcttcaactcaagcttataaaaatggtatttcaggtcctttcttttacgctgctggtgcttgttgtcaaattattttatttgcatttattgcaattaaagcaaaacagaaagctccaaatgctcatacttatttagaaattattaaggcaagatatggtccaattgctcatggtgttttcatcttctttgcatttgcaactaatgtacttgttactgctatgttattaactggtggttcagctgctgttagtgatttaactggtatgaatacagttgctgcaattttcttattccctgtcggtgttatggtttatacattatttggtggtattaaggcaactttcttaactgattatattcatacaattgcaattattgtcattattttaacttttgcttttacaacttatgcaacttcaccaattttaggttctcctggtaaagtttgggaattagttacacaggcaggtattgatcatccagttgatggtaatgcaaatggttcttatttaacgatgcattcaagatcaggtgggattttctttgttattaatattgttggtaattttggtactgtctttttagataatggttattggaataaagcaattgcttcatctcctgctgctgctttacctggttatattgctggtggtattgcttggtttgcaattccttggttaactgctacaactatgggattagcttgtttagcacttgaatcaaatccaagtttcccatcttatccaaatagattaacaagtgatcaagtttctgctggtttagttttaccttcagctgctgttgctttaatgggtaaaggtggtgcagttgcaactttatttatgattttcatggcagttacttcagcaatgtcagctgaattaattgcagtttcttcaattgttacttatgatatttataaaggttatattaatccaaatgcaagtggtaaaaaattaattttcacttcacattttacagttatattcttttcattggcaatgtcaggttttgcaacaggtttatattatgctaatatttcaatgggttatctttatgaaattatgggtattattatctcagctgctgttatacctgcaacttttacattaatttctaaacatccaaataaaatttcagttattgtttcaccaattttaggtacagcagttgcaattatgtcatggttagtttcaactcatacaatgtatggtgcaattactgttgataatacatttatggatgatccaatgttaattggtaatgttgttgcattattatcaccagctatttttatgccaattttaacattatgttttggatcacaaaattttgattttgaagaattaaaattaattaaaagagttgatgattcaactgaaattgaaaaagatttagaagatattattgatattgctccaaataatgatattgaaagtattgatgattcagatgataaagataaagaccttaaacttaatccattaaaatctaatgtttcattagctattaataatttagcacatgaagataaaatgattcatttggcaagaaaggaagaacaacatcttaaaagagcatctaaaattgcaggttatttatgtattgcattaagtttatcattattagttatttggccaatgccaatgtatggatcaaaatatattttctcaaaaaaattctttacaggttgggtaacagttggaattatttggattttcattacaggatttattgttataatttatccattatgggaaggtagagatggtatatttacaagttttagaggtatttattgggatttatcaggtcaaacttataaattaagacaatggcaaaatgaaaatcctgaaaaattacatgcagttagaagtcaaattagtgctcaattaattgaagagaatgaaattgatcatatcttagaataagcaagggagatttttttctagtttttatactttgtatttacaatagcttttataataataataataataataataataataataattaatattcgaaaataaaaaacaatcacttgctatctatctgataataagtaatagcaatgtaaaaaaagggattaaaaaaataaatgtttaaactccttatcaggggctcgaaccctggacatttcggtcgacttcttaaagaattcttaaaagccgaacgctctaccgactgagctaacaaggaatttgttgaaaaaatattattatgcttttctatagaattattggtgttaattacgtaagcaacggtgaaatataaacctagttttcaagcaagataatggttggacagtgttctattagtggtttataattagttatttaattagaactggcgtattattgagaaatagacttatttatgataaaataaattttttgggtaaatttatgagattttctaatgttactgaattattttaataattacaaacacttatttattttacataattagtatttttcaattatggtcttttacttagagtacgataaacctggttaatatatataattaaagggttattagtaagctgaaaaaggaagtatagaggagataccattcaaaattcatcgacaaaagtggtggtgaactcggttttttagacgcaattaattaaaggcgcaattaattcaaggaaaaaatattccagtgacatttttctggatgggtctaatgcaatttgtatgtattttatcaaattatagtgaggaaagcttattttttggtttcggtttttttgtgggtttttcagaaagcggtttttcagatataaatttaaataaccggatcaaatactgtttgttaacaaacgatattaattaattgcgtctctttttattatgtattctttacaatttttgatgtatctcttttcactaattgggctatgattggtaagataaaggtatactttgatgcatgctacagtgataatgttcctgatgttgcatttaatgatataaacaagatttttctaaataattcaattgcacaaatttcattactattaggtcaaactgaatctctaacaaatgaactaaaaaactccacagactatggtttaatgtacgttttccatcctaaagcatataaaatagatttaaattcattttcaaataattgtggttaccatgaattgattaatatttttctgaaaaatacatatttgaaagaatttactgcatattgtacatcaacaaaatttaaaactacaagaactgttttgacttttccaattttttcagatactgaaaagaacataattatgtttattgtttttgatttattcaataatgactatttcatattttctccattttttgatattaatttaaataatgtcaaagaaccgatttcgtcaccttgtcaaacccctcatgaaacaattgttgcaaaagttattttcatctgtgatgttctcagatttaatagattatcaactttagtttttaaaaaatgttccgaagaagtcataacagttcaatctccagtggatacttttatggaatgggaatcaaagttccctatggaaataagtatcatatgtaaaaaacaaggcgaagaaatgattgcttgggagaaagactacaatctttatgttaatacattattctttgataaatttatgaaaatttctccacttttatatcaaattagagatggaaaatattatttagcacctctaaaacgtttgatggagagatctgaaatgtttaattttgaaattacagatgatgccaaatgtgataaaaccacaatttttggtttaaatgatgatgggtttcttgattatattgcaaaatatacacataaaaaagtatcttacttgaaattacccgttgatgaatcaagtaatgatgatgaatctttcaaaaatatgaataaagttgttgaaaaaactccagagaatattaaatctataggtgattctatgaaagaattaaaggaacgttttgttgcatcaatggaggtttttgaaaaatgtgttaaaaataataccattaatgccaacttaatgaaagaatgtatctctaaatttgatgatttagaaaaaacaattaaatctaagaataatttgaatgataatgaaacccatgtatcagaacttaacaatcagttagaaagtttgaatattggaaatgttgactctaaaaaagttgacactgtaactaacaattctaacaaacttgatattgccaatgttgtgggtgttcccgattctacatcttctgattcatctagtactccagccaatgtttcaaccaaaactctatctattattcaatctaatactccaaccaacatttcaacaaatgtatcagccagttctccatccagtacttcatccagtactccatctaatattcaatctagtattcaacctagtaagcaaactaatgttccaaccaatgttacgaccaatgttccatccagtactccatccaatgttacgaccagtactccaaccagtattccaaccaatactccatccattagttcaaccccagccagtaattcatctagtacatcaatcaatgtatcaaccaaagctccatctattactccaccaaacgcttcatcatctagtaatcaatctagtactcctgctgatgttccaaacaatgcaccctctagtacttcatgtagttcatcatcaaatgctctaaccactgctccatctcgtactcccattgaagttccctccagtaattcatattcaaattctgaagtgagaatgcttctcatcaatgcaatagatataaataataaagatctgagagattacgaaattgaacaattagatgaacttttgtattatatattgaatcccgtcccagatgtaaggtttgttccttacatttattcttttgaatttgaattgttcaatgggaattttaaacaaaattatgaatccatgttttcaggaattgaaagtttgcttttaagcaaatggatttatttgagatgctcacttttaaaagacttgaaattggtaaagacaggtatgattgttaagacttctggtggtcctaacttaatgatgtgctcaccaaatttacttgatgttgtttctcgtatggttgatagtcagtatattcaagaagagtattttagaaaagtgttttattttcttgttcattattttcttgatctccctcctttcagagctaagtggaagcaacaacatagaaatatctacaataagaaaaagatattaattgttaagaattcagaagaaaagtttgcagaacaagggaactggcgtcctaataaaatctatactcttttgaatcaccaagtagtgaagagaatatatgataaaaacaatgcacgtagaagaagttatgatgaatgattttgttaagatgtagattaatgataaatttgatttctaaaaaaaccatttttttgtagtataatatttaataatggtgtagtatttacatatttacctacagtaaaacagttatgaaacagcagcattatactaaagaagtaatatatatcaaaacactttgaaaagatcaaattgaaaacctacatgaatcatgttaatatagcgaacctaaacatacagaaaatcaacatctttaaaagtgcttcttttttcaatttaattaattaatcttcttttcattggaaattgtattattgctgatgtatttaactaaataggttatatcattcataaaccacgcttcaattgatatggtggatttgtattccgatgcttcttattatgaaaaacgatatgatattccatttttcacctttaaggatataaaggtaatttctatcgatgattctattgcacaaattgtatttcttttatgtttagccaaatctcttcaaagtcttctgccaaacccttcaaatcatggtttaatatattttttccatcctgaaatatgccaaactagattagaattactccctgatgaatatgattccgacgatctaatccttacttaaaaacaaatatttaaaagaatttattttatattgtaagtcaacaaaattcaaaaagaaaagaactacattagtttttccaatttattctgaaactgaaaagaatataattatgcttatattttttgacttatataagaatgaatatttcatattttctccattctttgatatcaatttagacaatgttaagaaaccaatcttttcatcttgtcaaactattcacgaaatcaatgttgcaaaaatcctatttatctgtgattttctaagatctattagaaattcatctaaatgttttacaaaccattcaacaggaatcaagactattcaatctctatctgctgccttctcggaatggcaaacaaaatatcctcagataattaatgctattactaaaaagaattgtgatgaaatgaatatttcaaagaaaagttgccaatttgctgtttggtttttattccttgataactttctcaagaattctcaacttttatatgaagttaacgaaggaaatgactattctttatcaataaaaggtttattagagagaccaaaaatgttcaattatgaaattaccaatgaaaacaagttgaacaaaaaatcaatttttggtttaaatgatgatgaatttcatgctcatttggatgtcattgttggagagtatctaagtaatagaggtaaaattaacaaaagattgcctttcaatgaaaggtttgatccatataattctttgaaattacccgttgatcaatctgatgcttcttttttagctttaatcaacgcttttgatgaagttattcaaaaatctcctgaaagtactaaatatttaggtggttctatgaatgaaataaaggaaagttttaagaaatcattgaaggtttttgatatgtgtattttaaagaatatattagataataactataaaccatttattaatgattgtatttcaaaactgaaagaatcagggaaagaagtcgtttctaaaaataataaaagacaaaaaactaataatactttagatgataatgaacttgaagtaataaaacagatttatgcaatagaaggattgaaaatgggaagagatgacgattctaccaatcataaaaacactattcttaagcctggttctgattcttccactgattatgactctgacgaccgctcttactattgctttgagcgtaagccggaaaatatccctagaaaatctggctgtttatttgtgtcaaaagaagcagatatgagaagggatctcattgatgcaatagaagattcttatttgaaggaaaaggaaacaaacttaataaatgagtattgtgataatattttccataatgtcccaaaagatgaaaagaataaagtatacattttttcttttgaatttgaactagtcagtgaaaatacgagacagagctatacaaaaaagtttacaggactcaatagggaaactttgaataaatggattgatcatagattaaatgttttgaaaaattgggaactggtacgtaagggaatgcttatcaataaatctactatgcaaataatgtgttccatagaattacttgaagatgttggtgatgaggttgattttgaacgtaacataaagcgatttacaagggatcttttgaggttacttgtttattattatcttgatattccttactacaaacctaactggaatcaaaatcataaaaatatttacaaaacacagaagatactaatcgttaatactttgaaggaaaaaattttaagagaagaaaaagggagtcagagtacaatttatgttttggcaaacaacgaattaatcgagtgggtatatgaaatatatgccgactatgatatggcaaatgatgattggttctaatgcaggatgtagactgatattgactgaatttttgaaaactaatatttttcaaatatctatttatcctatttatattgtaatatttttttgtttaaacgtaaagtattacttatttacagaagtttaatcgttaactaacttttattcttttattagaaatgggaaaattacctacagggggcaaagattcataagcatcggaattatctacatgatcattaatattattagaatttgaaagatcttctaccgatatttcagataaagtattgtcatcaaatgaagtatcttcatcagtggcaccctcaaactcatcattagttaaaacgtaatcagttttgtactcgtcacaattgtttatataaatgaatggtgaatctattataccattataatcccatcctttttcattaaaaaaacaattaaaaatgtcattcaatgtatctgcaatatctcgatctttctttgtatttaacttcatgaaattaaatgatgattcattaattttttccaaatcttcaaatttacgtcttcttcttgcactagctctcagcgtggttaaaattccaagattcaaaccgtatagatttaagagtcccagtgtagcacctctatttgttagtttggcatttttgaattgtttaaaaatgaacttagcttttttcttattaacattttcagaaccatattttttctgaagagtgacaatatcatcattgatatcttgttgaataattttatcaatatcttcattaaattgaatatcaccatagttatgttgccctaatctctcattataaagaaaattaaattttgaagttgtacctgttgcaaaactcttcaagtttcttttactcaaagtttccgctttatcttgctgataagatttgataattttataaagaattttttgcacatttttaatagtaaaagaagatacacatgttatatctgtttctagtattgatggtactttttccctcagaaaggaaagaaatacaggtgtatcgtctgtgtaactcattaagaattctatgacttaactagaataacttattaaattaaaaccactttaattggtgataagattagttttaaattatataactataacgccaagatgcattacacgcgtaaagttcatgttcatgcttacataatctctagaatatggtattaaagattaagatcccattagacgcgtcgttgattgttgaatggacgatgttgcattgtctgatatcaatcaacttactattgctacgatatccactttaacttgtttagacaagtaaatattaaagtttaaatatgtccagttcagtctccttcattgtataacaaagcaattgaatgtaattttggtattccggaaattataaaaaatattttttataagtaatttgaacgataaagagtttcaagggaaaagaagaacaaagaaaggaataatagaatacaagaaaagagaaaacacaaaagaattagaacgacaacggtatgccagaaattatcaatttggatgaattgtttgcaaaactccaacaaagccaataatcacaaataaacactgcggttgagaaggctatgcttctgatgaattcaaagatggaagctcagagaaaaggaggtgaaaatagagcaaaacgaagaagaattgctcaaaagagaggaaacgattgagaaaactctacatcaaattgtagaggatgaaaagaagtcgttacaaaaggaagaagcattagaaaagaaagaaaacgagttgaaagaagaacagaaagcgattgaaattgctgcttaagatggttttaatagagtatacggattcgaagatgaaatggacagaagcattaaggctttagaagcagcaggatcaactccaggagccacagtggacaattctcagtttgagtattattcatctgagatggaaaagaaactccagatggccaacaatatgaatgttactagttttcaagttattgaagaacctatcgattttctaagtaaagaatcttcaagaacaagaattgtttatcaagtttaatcatttacaacatttctgtaggaattgtaactgcagatactgttcaagaaaccaaactgcctaccagatggaacgaaatttgcagaataaaaaggatgttaaagcagatgatgcgaatcttaattcacttgcaatctctgatttatctaatctgtcctcctggtagaaaatttctttaaaaatacggttctgtaaccaaatatatatgtttgaagattctttacttagaaaatcgataggttcttcaacgacgttaacactagtaacattcatactgttagctatctgaagcttcttgtccatctcagctaaacagtactcaaattgaaaagtgtcgactgtggctcctgtaaatctataatttatacagaatcacgtcttgtcgaaaattaaggtattccggaaattataagaatttatctttttgtgaatcatcagttagtgaagaggatatatgataagaacaatccacgtagaaaacattccatttgttaagatataaactaacaattacaattaaaatcacatttttatttgaaaatgagaggacttaatgattctactagttttacaaatacgaaaagaactctaattgattcaatagaaacaggtgatatgattatgaaggaaagaaaaatgaacttgatagaggaatattgtgataatattttccataatgttccaataaatgaaaaaaataagtttcacattttttcttttgaatataatctactcagtggaaatacgaaacagaactatagacaaaagttttcacaacttgatagggaaaccttgaataaatggattgattatagattaaatgttttgaaaaattgggaaaaggtacgtgatggtatgcttgtgaataagtctactatggaaataatgtgttccaaagacttaattaacgatgttgataatatggttgattatgaagatgactttaagttatatttaagagttgttttgagattacttgttaattattatcttggtattccttattacaaatctgactggaatcaaactcacaaacatacaccgttggcccttggtcactaacaaaaaaaaaaacgctaacaaatttttaaaatttgaaaattcctgaaaaatggaccattttcaactcgatttataagtgtctaatacacatcttcaagagttcatattgtatattcttgctcgtgaagaataggagattacaatgatataatttttgtatagttaatgtcaatatcaagaaaaaagtgatttttgaaatctaccccaaaaaagggattttttaattccatttttgtattacttatatggcttattttttagtctctaaaagctctatcataaagttcttaatttgcacattttaatgatgttattttcaagttatctaagcgtatctaagtgtatgtaaaatagctctgaaaaacagtaaaaaaggcccttttttgtgagagaataatctgaagaaggcttagcgaatatacctcgaaaatcatgagaatttccaaaaacatgctataggcgagtaattaccagtgtgttaagatgatattattaagtaaagaaatacttaattataaagtgttattataaacaaaaagaaaaaggaaaagaattataaaataataaagagcatcaagtatcccatcaactagttggaacacttggttttcttctaaacatcattccataatgaggtctgacatcaggcaccattttatcatgttttggtaaaccacatattggtgtgatattaacatcattatctagccacatccatcttgtagtctttgaaacatttttgatttcaggatgcagacatttttccaatggttcagtcagacaaggggcccaaggagtgataatttccatgtctgcatatttgattgcaagtaaactttcctcctcataattgaacctaagaattctcattaccttaataaaactccactctttccagttcttgattttggcaaaacattgacaatcatcaagcttcaatttaagtgaacgaataaacacataatcgagttcataaacagaaattaactttttatcagaaataccaaacttccttgaggcttgatttaacaaagttttaagttggctaagatcttttactttttctccaattttgaaattataacaagacatattgtcgattttcattaaaaaaattgatctcatatttttatacaacaaaattggaagtctgatccctagagttgtcattgtgtgacgccctggggcgtgtcaaacttttcacttccttgcaaaccctttcagttataaaacaccaagtgtcaaaaaaggaaccaacatcacaccatttttcaaacatgtggataacataatgagttggaagacagaacataatattcaaaaatttgtgctccttgctcaattcttcaaccctttgcatcaattttatgtaattttccttgagcagtggcacatcttcacgtggaacaccttgagccataaaacataataagtgttgattgatttcagcaagatattcaagaatttcagagtggatattattcaaacctaaattacatttcaccatcaaaggaaaggcatgacaaaacagtttgtaatctactgccttcagtcttaatttagcagcttctggggtaaagaatttatctaaattaccaggttcttcaaacatccctttactactaagaaaatttttaattgaattaatactaaaaaccaatgctccaaacaatttcttatccaaaattttaaaacctttctctagtaatgcatttatgttctgtcaaattatgaattaatcaagcgggtatatgaaatgtttcagactgataatgaatagtacttttagaaactactttattgtcattgattatattatcaacaataaaatatttcaaaaacaaagctgagccacttttgaaatttgtagcttttatttacatcttaattttaattttgaattttataattgttatttttgacctttagaaattgctattccgatgataccagaaagtcttacgcttagcgggaactatattcatcaatgtgatcattagagcattacattgatacaaaagattttttatggggtcttatctatgtagtataatactaaggatgcttttttgaaaaatcttttttaactgtgcatgtttttttttgattcaagaaataggattaatatagatcattgtctactatgatatatctcttttcactaattgggctatgattggtaagatgaaggtatactttgatgcatgctatagtgataatgttccagatgttgcatttaatgatataaataagatttttctaaataattcaattgcacaaatttcattacttttaggtcaaactgaatctctaacaaatgaactaaaaaattcatcaaactatggtttaatgtacgttttccatcctaaagcatataaaatagatttaaattcattttcaaataattgtggttaccatgaattgattaatgtttttttgaaaaatacatatttgaaagaatttactgcatattgtacatcaacaaaatttaaaactacaagaactgttttgacttttccaattttttcagatactgaaaagaacataattatgtttattgttttcgatttattcaataatgactatttcatattttctccattttttgatattaatttaaataatgtcaaagaaccgatttcgtcaccttgtcaaacccctcatgaaacaattgttgcaaaagttattttcatctgtgatgttctcagatttaatagattatcaactttagtttttaaaaaatgttccgaagaagtcataacagttcaatctccagtggatacttttatggaatgggaatcaaagttccctatggaaataagtatcatatgtaaaaaacaaggcgaagaaatgattgcttgggagaaagactacaatctttatgttaatacattattctttgataaatttatgaaaatttctccacttttatatcaaattagagatggaaaatattatttagcacctctaaaacgtttgatggagagatctgaaatgtttaattttgaaattacagatgatgccaaatgtgataaaaccacaatttttggtttaaatgatgatgggtttcttgattatattgcaaaatatacacataaaaaagtatcttacttgaaattacccgttgatgaatcaagtaatgatgatgaatctttcaaaaatatgaataaagttgttgaaaaaactccagagaatattaaatctataggtgattctatgaaagaattaaaggaacgttttgttgcatcaatggaggtttttgaaaaatgtgttaaaaataataccattaatgccaacttaatgaaagaatgtatctctaaatttgatgatttagaaaaaacaattaaatctaagaataatttgaatgataatgaaacccatgtatcagaacttaacaatcagttagaaagtttgaatattggaaatgttgactctaaaaaagttgacactgtaactaacaattctaacaaacttgatattgccaatgttgtgggtgttcccgattctacatcttctgattcatctagtactccagccaatgtttcaaccaaaactctatctattattcaatctaatactccaaccaacatttcaacaaatgtatcagccagttctccatccagtacttcatccagtactccatctaatattcaatctagtattcaacctagtaagcaaactaatgttccaaccaatgttacgaccaatgttccatccagtactccatccaatgttacgaccagtactccaaccagtattccaaccaatactccatccattagttcaaccccagccagtaattcatctagtacatcaatcaatgtatcaaccaaagctccatctattactccaccaaacgcttcatcatctagtaatcaatctagtactcctgctgatgttccaaacaatgcaccctctagtacttcatgtagttcatcatcaaatgctctaaccactgctccatctcgtactcccattgaagttccctccagtaattcatattcaaattctgaagtgagaatgcttctcatcaatgcaatagatataaataataaagatctgagagattacgaaattgaacaattagatgaacttttgtattatatattgaatcccgtcccagatgtaaggtttgttccttacatttattcttttgaatttgaattgttcaatgggaattttaaacaaaattatgaatccatgttttcaggaattgaaagtttgcttttaagcaaatggatttatttgagatgctcacttttaaaagacttgaaattggtaaagacaggtatgattgttaagacttctggtggtcctaacttaatgatgtgctcaccaaatttacttgatgttgtttctcgtatggttgatagtcagtatattcaagaagagtattttagaaaagtgttttattttcttgttcattattttcttgatctccctcctttcagagctaagtggaagcaacaacatagaaatatctacaataagaaaaagatattaattgttaagaattcagaagaaaagtttgcagaacaagggaactggcgtcctaataaaatctatactcttttgaatcaccaagtagtgaagagaatatatgataaaaacaatgcacgtagaagaagttatgatgaatgattttgttaagatgtagattaatgataaatttgatttctaaaaaaaccatttttttgtagtataatatttaataatggtgtagtatttacatatttacctacagtaaaacagttatgaaacagcagcattatactaaagaagtaatatatatcaaaacactttgaaaagatcaaattgaaaacctacatgaatcatgttaatatagcgaacctaaacatacagaaaatcaacatctttaaaagtgcttcttttttcaatttaattaattaatcttcttttcattggaaattgtattattgctgatgtatttaactaaataggttatatcattcataaaccacgcttcaattgatatggtggatttgtattccgatgcttcttattatgaaaaacgatatgatattccatttttcacctttaaggatataaaggtaatttctatcgatgattctattgcacaaattgtatttcttttatgtttagccaaatctcttcaaagtcttctgccaaacccttcaaatcatggtttaatatattttttccatcctgaaatatgccaaactagattagaattactccctgatgaatatgattccgacgatctaatccttacttaaaaacaaatatttaaaagaatttattttatattgtaagtcaacaaaattcaaaaagaaaagaactacattagtttttccaatttattctgaaactgaaaagaatataattatgcttatattttttgacttatataagaatgaatatttcatattttctccattctttgatatcaatttagacaatgttaagaaaccaatcttttcatcttgtcaaactattcacgaaatcaatgttgcaaaaatcctatttatctgtgattttctaagatctattagaaattcatctaaatgttttacaaaccattcaacaggaatcaagactattcaatctctatctgctgccttctcggaatggcaaacaaaatatcctcagataattaatgctattactaaaaagaattgtgatgaaatgaatatttcaaagaaaagttgccaatttgctgtttggtttttattccttgataactttctcaagaattctcaacttttatatgaagttaacgaaggaaatgactattctttatcaataaaaggtttattagagagaccaaaaatgttcaattatgaaattaccaatgaaaacaagttgaacaaaaaatcaatttttggtttaaatgatgatgaatttcatgctcatttggatgtcattgttggagagtatctaagtaatagaggtaaaattaacaaaagattgcctttcaatgaaaggtttgatccatataattctttgaaattacccgttgatcaatctgatgcttcttttttagctttaatcaacgcttttgatgaagttattcaaaaatctcctgaaagtactaaatatttaggtggttctatgaatgaaataaaggaaagttttaagaaatcattgaaggtttttgatatgtgtattttaaagaatatattagataataactataaaccatttattaatgattgtatttcaaaactgaaagaatcagggaaagaagtcgtttctaaaaataataaaagacaaaaaactaataatactttagatgataatgaacttgaagtaataaaacagatttatgcaatagaaggattgaaaatgggaagagatgacgattctaccaatcataaaaacactattcttaagcctggttctgattcttccactgattatgactctgacgaccgctcttactattgctttgagcgtaagccggaaaatatccctagaaaatctggctgtttatttgtgtcaaaagaagcagatatgagaagggatctcattgatgcaatagaagattcttatttgaaggaaaaggaaacaaacttaataaatgagtattgtgataatattttccataatgtcccaaaagatgaaaagaataaagtatacattttttcttttgaatttgaactagtcagtgaaaatacgagacagagctatacaaaaaagtttacaggactcaatagggaaactttgaataaatggattgatcatagattaaatgttttgaaaaattgggaactggtacgtaagggaatgcttatcaataaatctactatgcaaataatgtgttccatagaattacttgaagatgttggtgatgaggttgattttgaacgtaacataaagcgatttacaagggatcttttgaggttacttgtttattattatcttgatattccttactacaaacctaactggaatcaaaatcataaaaatatttacaaaacacagaagatactaatcgttaatactttgaaggaaaaaattttaagagaagaaaaagggagtcagagtacaatttatgttttggcaaacaacgaattaatcgagtgggtatatgaaatatatgccgactatgatatggcaaatgatgattggttctaatgcaggatgtagactgatattgactgaatttttgaaaactaatatttttcaaatatctatttatcctatttatattgtaatatttttttgtttaaacgtaaagtattacttatttacagaagtttaattgttaactaacttttattcttttattagaaatgggaaaattacctacagggggcaaagattcataagcatcggaattatctacatgatcattaatattattagaatttgaaagatcttctaccgatatttcagataaagtattgtcatcaaatgaagtatcttcatcagtggcaccctcaaactcatcattagttaaaacgtaatcagttttgtactcgtcacaattgtttatataaatgaatggtgaatctattataccattataatcccatcctttttcattaaaaaaacaattaaaaatgtcattcaatgtatctgcaatatctcgatctttctttgtatttaacttcatgaaattaaatgatgattcattaattttttccaaatcttcaaatttacgtcttcttcttgcactagctctcagcgtggttaaaattccaagattcaaaccgtatagatttaagagtcccagtgtagcacctctatttgttagtttggcatttttgaattgtttaaaaatgaacttagcttttttcttattaacattttcagaaccatattttttctgaagagtgacaatatcatcattgatatcttgttgaataattttatcaatatcttcattaaattgaatatcaccatagttatgttgccctaatctctcattataaagaaaattaaattttgaagttgtacctgttgcaaaactcttcaagtttcttttactcaaagtttccgctttatcttgctgataagatttgataattttataaagaattttttgcacatttttaatagtaaaagaagatacacatgttatatctgtttctagtattgatggtactttttccctcagaaaggaaagaaatacaggtgtatcgtctgtgtaactcattaagaattctatgacttaactagaataacttattaaattaaaaccactttaattggtgataagattagttttaaattatataactataacgccaagatgcattacacgcgtaaagttcatgttcatgcttacataatctctagaatatggtattaaagattaagatcccattagacgcgtcgttgattgttgaatggacgatgttgcattgtctgatatcaatcaacttactattgctacgatatccactttaacttgtttagacaagtaaatattaaagtttaaatatgtccagttcagtctccttcattgtataacaaagcaattgaatgtaattttggtattccggaaattataaaaaatattttttataagtaatttgaacgataaagagtttcaagggaaaagaagaacaaagaaaggaataatagaatacaagaaaagagaaaacacaaaagaattagaacgacaacggtatgccagaaattatcaatttggatgaattgtttgcaaaactccaacaaagccaataatcacaaataaacactgcggttgagaaggctatgcttctgatgaattcaaagatggaagctcagagaaaaggaggtgaaaatagagcaaaacgaagaagaattgctcaaaagagaggaaacgattgagaaaactctacatcaaattgtagaggatgaaaagaagtcgttacaaaaggaagaagcattagaaaagaaagaaaacgagttgaaagaagaacagaaagcgattgaaattgctgcttaagatggttttaatagagtatacggattcgaagatgaaatggacagaagcattaaggctttagaagcagcaggatcaactccaggagccacagtggacaattctcagtttgagtattattcatctgagatggaaaagaaactccagatggccaacaatatgaatgttactagttttcaagttattgaagaacctatcgattttctaagtaaagaatcttcaagaacaagaattgtttatcaagtttaatcatttacaacatttctgtaggaattgtaactgcagatactgttcaagaaaccaaactgcctaccagatggaacgaaatttgcagaataaaaaggatgttaaagcagatgatgcgaatcttaattcacttgcaatctctgatttatctaatctgtcctcctggtagaaaatttctttaaaaatacggttctgtaaccaaatatatatgtttgaagattctttacttagaaaatcgataggttcttcaacgacgttaacactagtaacattcatactgttagctatctgaagcttcttgtccatctcagctaaacagtactcaaattgaaaagtgtcgactgtggctcctgtaaatctataatttatacagaatcacgtcttgtcgaaaattaaggtattccggaaattataagaatttatctttttgtgaatcatcagttagtgaagaggatatatgataagaacaatccacgtagaaaacattccatttgttaagatataaactaacaattacaattaaaatcacatttttatttgaaaatgagaggacttaatgattctactagttttacaaatacgaaaagaactctaattgattcaatagaaacaggtgatatgattatgaaggaaagaaaaatgaacttgatagaggaatattgtgataatattttccataatgttccaataaatgaaaaaaataagtttcacattttttcttttgaatataatctactcagtggaaatacgaaacagaactatagacaaaagttttcacaacttgatagggaaaccttgaataaatggattgattatagattaaatgttttgaaaaattgggaaaaggtacgtgatggtatgcttgtgaataagtctactatggaaataatgtgttccaaagacttaattaacgatgttgataatatggttgattatgaagatgactttaagttatatttaagagttgttttgagattacttgttaattattatcttggtattccttattacaaatctgactggaatcaaactcacaaacatacaccgttggcccttggtcactaacaaaaaaaaaaacgctaacaaatttttaaaatttgaaaattcctgaaaaatggaccattttcaactcgatttataagtgtctaatacacatcttcaagagttcatattgtatattcttgctcgtgaagaataggagattacaatgatataatttttgtatagttaatgtcaatatcaagaaaaaagtgatttttgaaatctaccccaaaaaagggattttttaattccatttttgtattacttatatggcttattttttagtctctaaaagctctatcataaagttcttaatttgcacattttaatgatgttattttcaagttatctaagcgtatctaagtgtatgtaaaatagctctgaaaaacagtaaaaaaggcccttttttgtgagagaataatctgaagaaggcttagcgaatatacctcgaaaatcatgagaatttccaaaaacatgctataggcgagtaattaccagtgtgttaagatgatattattaagtaaagaaatacttaattataaagtgttattataaacaaaaagaaaaaggaaaagaattataaaataataaagagcatcaagtatcccatcaactagttggaacacttggttttcttctaaacatcattccataatgaggtctgacatcaggcaccattttatcatgttttggtaaaccacatattggtgtgatattaacatcattatctagccacatccatcttgtagtctttgaaacatttttgatttcaggatgcagacatttttccaatggttcagtcagacaaggggcccaaggagtgataatttccatgtctgcatatttgattgcaagtaaactttcctcctcataattgaacctaagaattctcattaccttaataaaactccactctttccagttcttgattttggcaaaacattgacaatcatcaagcttcaatttaagtgaacgaataaacacataatcgagttcataaacagaaattaactttttatcagaaataccaaacttccttgaggcttgatttaacaaagttttaagttggctaagatcttttactttttctccaattttgaaattataacaagacatattgtcgattttcattaaaaaaattgatctcatatttttatacaacaaaattggaagtctgatccctagagttgtcattgtgtgacgccctggggcgtgtcaaacttttcacttccttgcaaaccctttcagttataaaacaccaagtgtcaaaaaaggaaccaacatcacaccatttttcaaacatgtggataacataatgagttggaagacagaacataatattcaaaaatttgtgctccttgctcaattcttcaaccctttgcatcaattttatgtaattttccttgagcagtggcacatcttcacgtggaacaccttgagccataaaacataataagtgttgattgatttcagcaagatattcaagaatttcagagtggatattattcaaacctaaattacatttcaccatcaaaggaaaggcatgacaaaacagtttgtaatctactgccttcagtcttaatttagcagcttctggggtaaagaatttatctaaattaccaggttcttcaaacatccctttactactaagaaaatttttaattgaattaatactaaaaaccaatgctccaaacaatttcttatccaaaattttaaaacctttctctagtaatgcatttatgttctgtcaaattatgaattaatcaagcgggtatatgaaatgtttcagactgataatgaatagtacttttagaaactactttattgtcattgattatattatcaacaataaaatatttcaaaaacaaagctgagccacttttgaaatttgtagcttttatttacatcttaattttaattttgaattttataattgttatttttgacctttagaaattgctattccgatgataccagaaagtcttacgcttagcgggaactatattcatcaatgtgatcattagagcattacattgatacaaaagattttttatggggtcttatctatgtagtataatactaaggatgcttttttgaaaaatcttttttaactgtgcatgtttttttttgattcaagaaataggattaatatagatcattgtctactatgatatatctcttttcactaattgggctatgattggtaagatgaaggtatactttgatgcatgctatagtgataatgttccagatgttgcatttaatgatataaataagatttttctaaataattcaattgcacaaatttcattacttttaggtcaaactgaatctctaacaaatgaactaaaaaattcatcaaactatggtttaatgtacgttttccatcctaaagcatataaaatagatttaaattcattttcaaataattgtggttaccatgaattgattaatgtttttttgaaaaatacatatttgaaagaatttactgcatattgtacatcaacaaaatttaaaactacaagaactgttttgacttttccaattttttcagatactgaaaagaacataattatgtttattgttttcgatttattcaataatgactatttcatattttctccattttttgatattaatttaaataatgtcaaagaaccgatttcgtcaccttgtcaaacccctcatgaaacaattgttgcaaaagttttgtttatttgtgatgttcttagatttaatagattatcaactaaatcctttaaaaaatgttcagaagaagttacaattattcaatctccagtgtatacttttatggaacgggaatcaaagttccctatggaaataagtatcatatgtaaaaaacaaggcgaagaaatgattgcttgggagaaagactacaatctttatgttaatacattattttttgataaatttttaaaggtttgtccacttttatatcaaattatagatagaaaatgttatacattaccattgaaaactttaatggaaagttctaaaatgtttaattttgaaattacagatgatgccaaatgtgataaaaccacaatttttggtttaaataatgatgggtttcttgattatattgcaaaatatacacataaaaaagtatcttacttgaaattacccgttgatgaatcaagtaatgatgatgaatcttacttgaaattacccgttgatgaatcaagtaatgatgatgaatctttcaaaaatatgaataaagttgttgaaaaactccagagagtattaaatctataggtgattctatgaaagaactaaaggaacgttttgttgcatcaatggaggtttttgaaaaatgtgttaaaattaataccattaatgccaacttaatgaaagaatgtatctctaaatttgatgatttagaaaaaacaattaaatctaagaataatttgaatgataatgaaactcatgtatcagaacttaacaaccagttagaaggtttgaatattggaaatgctgattctaaaaaagttgacactgtaactaacaattctaacaaacctgatattgccaatgttatgaatgttcctgattctacatcttctgcttcatctagtactccagccaatgttccaaccaaagctccatctataactccaaccactattcctccaactaaatattcatccagtacgccaattaatgctccaataccagcaaatatatcctctagtactgcatccaatgtctcatcccaagctccatctattatacaatctaatactccaaccaacatttcaacaaatgtatcagccaattcttcatccattacttcatccagcactccatctaatgttcaatctagtaagcaaactaatgttccaaccactgttacaaccaaagttccatccagtactccatctattactttaaccccggccagtaattcttctactacaccaaccaatgtatcagccaaagctccatctgtttctccatcgaatgtctcatcatctaatattcaatctactgctccgaccaatactttaatcaaagctcagactaaagaaccctctaatacttcatcaaatgctccaaccaaaactctatctctttcttccactctagttctccccaatacttcatttaaaaattctgaagtgagaatggttctcatcaatgcaatcgatataaataataaagatttgaaaaatcatgaaattgaacaattagatgaacttttgcattatataatgaaaccctccccaaaaagtgcaatgattcaaccttacattttctcttttgaatttgaactaattggtgaaaatacgaaacaaaattatgaatctaagttttcaggaattggaagtgatcttttgagttgttggattaatttgcgatgccaacttttagaaaattgggaattggtaaaaacaggtatggttgttgagacgtctaatttgtatatgatgtgttcaccaaatttacttgagattgtttctaacatggttgatgaagattattctgaagctgaatatttcagaaaaactttttatttccttattcattattatcttgatctccctccttttagagccaaatgggagcattaccacagaaatttttactatagtgaaaagatattaatagttaagaattcagaagaaaagtttgcacaacaagggaactggcaccctaatcaaatctatactcttgtgaatcaccagttagtgaagagaatatatgataaaaaaaatatacatagaaaacgttatactgaatgattttgttaagatatagactaatgatgaatttgatttctaaaaatttttttttgtagtatgtatagtattatattaatctataaattacagtacaacagttacaaatcagcagcattatacgaaagaagtaatatatcaaaacattttgaaaagatcaatttgaaaacctacctgaatcatgccaatatatattggttccgtagaattacttgaaggtgttgctaatatacccaaatttgaaagcaacataaagttatttaccgaaaatcttttaatgttgcttgcttattattatcttgatcttccatattacagatcccgttggaatcaaactcatgaaaatatttacaacacacaaaagatattaattgttgaaaacttagaagagaaaattctaagagaaaaaaacggggaacaaagtccaatttttgttttgtcgaatcaagaattaattaagggaatatataatatattagacatatgggatgatatggatgattctatggatgaagaatacctatgagtttgatgcaggataaaaattaacattgaaatgattttctaaaaactgcttttatttttttaaatttttatgtattctatttttattgtgattttttgcttaaatataagtttattagagtattacttatttacacaagtttaatcgttaattgacttttctccttttattagaaatgggaaaattacctacagggggcaaagattcataagcatcggaataaacctcatgattattaatattattagaacttggaagatcatttaccgtcatttcagataaagtatcatcatcagataaagtatcatcatcagataaagtatcatcatcagatgaagtatcgtcaccagaagagctcccaaaatcactagttaaaacgtaatcagtttcgtacccgtcacaattgtttatataaatgaatggtgaatctattataccattataatcccatcctttttcattaaaaaaacaattaaaaatgtcattcaatgtatctgtaatatctcgatctttctttgtatttaatttcatgaaattaaatgatgattcattaattttttccaaatgttcaaatttacgttttcttcttgaactagctctcagtgtggttaaaattccaagattcaaaccgtataggtttaagagtcccggtaaagaacctctatttgttagttttgcattcttgaatttttcaaaaataaatttagcttttttcttattaacatttttcgaaccatattttttctaaggagtgacaatatcatcattgatatcttgttgaacaattttatcaatagcttcattaaattgaatgtcactagatttatgttcccttgatctctcactataaaaataattgaagtttgaagttgtacctgttgcaaaacgctttaaatttttttcacttaaaggatcccctttatcttgctgataagatttgataattttataaagaattttttgaacgtttttaatagtaaaagaagatacacatattatatctgtttctagtattgatggtactttttcccttaagaaaagaagaaatacaggtgtatcgtctgtgtaagtcattaagaattctatgaccaaattagaatagtaaaatcattataattgtcaaactattacgccaaaatgcattaatcctttaaattaaaaacatgttcatgcttacataagcctttacagcttattgataaatttgatattcattacgtaatgaaatacaaaatttaaagttagatgattggttagaatcccctagtctcagagagcccaaatataatgaaagttaaaatacttcataatagaagtaactagattaaaacggatttcttgtatacacaaattttaacaaaatataccgatgagacccttaaaaacttacatattgttgaaataaacagggaaacatacgatttttagccccaaaatcgaacaaatttgaattataatggttacacccgcactaaaatgcgggttttgaaaattttactatgtaaaaaagttacaaaatttcccactctatagatgatattcaataatataatgaagctattgataaaatttatcaacaagataatcaatgatgatattgtgactcttgagaataaatttgggtctagaaatgttaataaaagaaaagctaagttcattttaaacaattcaaaaatgcaacactaactaatagagttactacactgggactcttgaatatatacggttttaatcttgggttcttaaccaacttgatcattaatattattaggaattggaaacctatctgtaaggaatgaatcaaaagcatcagaaaaaccctcatgatcattaatattattagaatttgaatgtttatctactgatatttcagataaagtatcatcagatgatgtgtcatcaccagaagcactcccaaaatcactagttaaagcataatcagtgtcgtatctgtcacaatcgcttatttcaataaatggtgaatctattatacaagagtcccggtaaaaaacctctattgattaattttgcatatttgaaatttttaaaaatgaacttagcttttcttttattaacatttctagaccctcaagagtcacaatatcatcattaatattttgtcgaataatattatcaatagcttcattaaattgaatatcaccatacacgtgttgacctgatctctcgttatacaggaaattaaattttgaagttgtgcttgttgcaaaaaacttcaaatttctttcacttaaaggatcccctttgtcttcctgataagatttgataattttgtatagaatattttttacgtttttaattgtaaaagaatatttacatgttacatctgtttctaatattattggtactttttctcttagaaaagaaataaacttaggtgtatcgtctgtgtaacttattaggatttttatgaccaaattagaataatatattagatttaaaaaagtactgaaaccactcaaattgctgataaatagcacgcgtaaaccatgtttatgcttacataatctataaaaaccagtgaattcatttggcaaaaaaacattttcaaaaaagtgcctatatttcgggtatttttaattataggcgtaaattgtttattcgggtatcggcaaagaacataattatgctttttgtcttgaatttgggctttttacttgactattttaaaaaatttaccaaagctgtttttaaagcttgattttaattaacttatttggcaaaaataagacaaatttttttcaaaatattttgcttacgtaatcaacactctaagagtggaaataacaccaaaattttattgatataacagctcttatggccaagttggtaaggcgctacactagtaatgtagcgatcctcagttcgactctgagtgagagcagttgtttattttttacattttcaattttttttacttttactaacaataattttttttgttaataattttttttttcactacatgaaatctagtgtttaataagttaaattcttttttattatcaataaggagataactaagccatggctagaaagaaatctgcagcaaaaaaggcaagagaacaacaagaagctgaattagctaaactcaatggaggtgttaaaccattaccagctgatattgaagaactgaaaaaagaattacgtgaagaagaagctgaggatgaagaagaagaaagtgatgaagaggaagatgattatggtatgttattaactgaaaatgttgaaaatggattaaatgaagttttaaaagctattaaaacaggtgataaaagattatttgattcatcagtaaaatttttcaaagaagatgaagaaggagctgaaggtgaagaaggagctgaaggtgaagaaggtgaagaaggtgaagaagctaaggatacaactaaaactactgatcaaaagccattatatttaaaggaatatcatcgtaaagcattacttgcagatgaagaagcacaaagtattatgacatcagttgatgatattaaaccatatgcagttcaacaaagagaagacaaggaaaatttaattaaagaaattcataatgctcttggtagtgataatgaagatgatgaaagtgatgatgattttcttattaaaaaggaaaagaaaactgttgaatcatcaaataaagctgcaccaattgctcttccagatccaaagaaggatggtgaaaaatttttagaggcttttatggaaaatcatgcatggttaccagataaaggtgaagaagttcaaatggaagttgaagatgatgaagaatttgacaaagcagcagaaacttttgaaaatgcatataatttccgttatgaagatccaaaatcaactgaaattatcagttatgcaagatcacaagctacaatgagacgtgaaaaaatgaatagtagaaaaagagatagattaaagcaacaagaggaagctagaaaacaaaaggaagaaattgatttagcattaaagaagaagaaacaaaagacaaccaatttagttgctgatagaattaaagaaattaaggaagcagttggtgataatgttagtgaagagaaaattattaaggttttcggtgatagtcttattaatcaagattttgataatgatgaatgggatgcaaagatgaatgaaattttcaatgatgaatattatggtgatgatgatgaaacatttaaaaagccagaatggtctgacgatgatttaatgaatggacaatctgataatgatgaaaatgaggaagtaaaagataatgctgaagaagaaattgaagaagtagttgaagaagagaaaaaatcaagcaaatcaaaaaagaaggcagaaaaatatgataagaaaaaagaaaagaataaggtaaaagaattagcagaacgattggttgaatccaagacagtagatttactcgaagaagttgaagaagaacgaggtagagataaggagaagtccaaatttaaattcaaatatagagaagtttcaccagaaagttttggattaacttataatgaaattttaaaagctgatgataaagatttaaatgaatttattggattaaagaaattagcaccatatagaccaaaggaaaaattagcaaaggataagagaaaagttactaagagtaaacatctaagagaatggagaaagaaaacttttggatctgaaactggtgttccagaaagtgaagaattagagattgcaattccatcaattgttttcgataagaaatctaaacacaagagttctaaaaacaagaaaaggaagttcaatccttaattcgttgtaaactttatacttttatacttttatacttatagacattgtaaaaaaactgtagtaaaataaagcatgtactttgtacagttactaaggaattgaaaacacgcataaaatttggtgaaatttcagtttcatgttttactgtctaagatctcttcaatttcttgtttatttacggtctctaaaggcgtcaattttactttatagaccatgtccaaggaccctattgccgattgggatgatgatgatgatgatattttaggaaatccaactgatgaggaggaggaagatccattatttgggaagtttgaaaataataaggctcttggacttttactttcacctaaaaagaagaaacttgaactaaataaggtccctaatcctctattatcaccaactaagaaacgtaatagtagtgtattgggtgattcagataaactgagaaatcagaaagtgaaaaaacgtactaacacagttgatataatacaacaacttcaatcacgtatgaagaatccattggataaagaattaggattttcagttaataaaacatctataaactctttttacttgaaagattttaataagatattaacagagaagaaaagagatagtgaaattaataaattgcttgaagaagaggataatattgctaaaaataatgaattcgttgaaaaggaaataaatcaatgggttgtcgatcatgttaataaagatttcttagaaataaatacagatggtgtaaaggttcattcaagatggatgaagaatttgaaaaaagatatgaagaagatcattgaagataataataatgtatatgataaagttgtcttagagaaaggactttctaaattcagtaaatatttcccatttaaatgtttcactaaaaaaggtattgttgatttaaagactaatatgctatatgataacaatagttttgatatattaataaaaacagcttctgttcaatatgttgagaattttattggcagtaaatgtaaaataaatgatgatccccaatataaaaatttaacaaccgttttggattgtttaggatttgatgagacacttattgaaagtaatgctcctatagagaagaaatttgataggaaagatccattgccaattgatggatgtggattacaagcttttaaatttattcaactgttgaaaatagattcatttaatttagttgaaaatatgaagagtatactttcttcattaattctaatgagtcttgattataatgttggcaaagatgttagaacctatctttacaagaataaaatgatgaatgttattgatataatattagataaagtatatgaatataaggaaaatatatcattgatcaataagattttaaaagattattttaatgaaagtcaacctgaactttggtttagatttgtggaaagaatattcacattatttagaattgataatttttttaaaggacagttagtgatgcactttttagaagaaaatagggttaatgataatgttgaatggaattttgataatgataatgatgtagatgatgtcaataatatcgacaataacagtgaaacttttgagagattttgtacatacattgaaagtttatcctatgcacaattacaagaagcagataatacaacatatccagccattatttacatgaaagttgaactaatgaaaaatatgataataagcaatgaattggttattaagaaatggatgaaggaagattataaaaaatatgaaagttttaaaagatcaattttacgattgaaaaacaattattttaagaaatgtgaaaacagtttagattcaaatatacctaaaagtaagagaatattagattttatttatcatgaaatatcggctatggatgttgaagatttttttgctgaagatagcagtgcatcataaaacattacatttttattcaattatttttattggtttatatgggagatatcaggaggtatatatataagatgtttgcgataaaggatagtgattacaggctaaaataattcagaacaaactgatcttagatccattattgatcttacaatatgaatatcaagagctggataagtattgagatcttcgggaagatctgaatcaagttcaacatattgaataactttaccccaatcaaatttacgagcagctttaacgttaatttctgaatcatcaatgaaatatacattttccttattaactgcaccagattctatgaaagctttttcaaatgcaccttccatgggtttacatattaaggggaaattattataatcacagaatgataaaccatcaaatatatcacctaaacctaaaagttctataacttttaaaccatgatttttataagcatttgtaaataaccataatctttcaactttaccagattttttcaaatcaagtaataaatttcttaattttggattaggtgttaaaattttatccaaaggtaatgcatcatcaacaactttattatattccattgcatcaactttatgtaatctaactaaaccttctaatgctaaaccatattgtttataataatgcatgtgtaaatcatgagcttctttatcattaagatgaagatgctttttgaaatatctgtgaatataaatttgcattaaatcatgaattctagttgatctatgataaagacaattatcaatatcaaagaagaatattttaccatttggagacattttttgagctggtgaatttacggaagtatccgggaatgttaaatttacccttggtaagttgcttttcagttgaaattcaggtgaattaaggtctgaaagtgctaattgagatttggattgttgattcaagatcagaatctctctttctttaagatcatcatcattataatcattcaaattaacacacgtgttatcatcattggaagtgaagactgaatctgattgaacaagtggttgagacatggtgagatatgataataatatctatgataaccctatacaatcaatcactataaaatactcaattctaataatctataaaaagaacttgtagaaaagaaacatgtagttaataaaagataaaaggtaaataaaaatagatcagccaccttttcaaatcgcaacatgaatttccaccgttttcccctatttgatttatcttatctttactgtttgtctttcttttgtcttcatctgttctctcttcttctgcaacggtaggtactctcctggtaggtctctgaactttaaatcatctctctcaaactatttctctttttattcggtgtttccattccctctagtatcccatatatcttatcttatcttatctgatctgatccttatctaaaattagaaacaatcaaaaaaatgaaactactgttattgtcaatcatcccccaactaatacctctagccttcttgatacttgtatctatcacagctccaactctcaagaatatttatttagcaaaatcaaatgatggaactatattcggtatatttggttattgtacctcagattcagattcaaatttaacttgttctccaatttcacttaataattcaatatcagaatatatatcatccaatatattatcctcttcaaaaatggatgatttatcaacttattttatcattgccccaatatctgctggtttaaccttcttttcaatatttttaacatcattgattatttcaataaatgggaaaattacttcttcaacttggtttatctctttatcaatattaactactgttttagcatttttaacatcagcttttgtttgcataatcactttcttaatattttatcctaatgttaattggttagcttggtgtttaattccttctgctgttattaatttggctgcaatcgttttcaatgccttattatttaaattattaccttcaccaaatgaaattttaagtgatgatgatgatgaaattgaaattgaaaataaaaataatggtgaaattaactatgatacctcagcaacctttgacggtaataataattttgaatatcgtcataatttatcagatattaataatattcctggaattgaggaaaaaaatcatgtactacttaatgaaaattcagccaattcatcatttttggatttagaaaaggaaaagaatagttccattaacgttaaccaacaagaaaatgatattatgaaatcttcttcatctaaattatccttaaaagtaccgtccattaacgatccttatgtgaatgatgccgatagtatgatggatggtgggagtttcaatgataatcgtcttaatgatgttgaaaatatgtctttcaagagttcatcttcaaattttacaagtatttcacaaagaccaatcaacgcaaattattatgcaggtgcaagtgaaaagccaagaattccattaggaaataatcaattcaataatcaattcaataatcaatataataataataataataatcaaggtaatccatatcaacagggacatcaacaacgtcaattgaataatttccaaaatcaaatgtcttcaatgccgaatcaaaataagagtatgtacatgaagaaacctaaaccttatatgttaatgggtagacctaataatatgaatatgaatatgaactcaggtatgagaaataatccaatgaacccatacttaccacaacaaggttatcaacaaaatatgaataatagaccttatccatatcaaaataatcattatccaaataatcaatttcaacaaccatttaatccaaatcaaagaaatcaatttaattcctcaattccaccaaatggtcctaattataatcaacaacaaaataattttgttccaatgaaatataaaggtcgtactaaaatgaacttcccacctgcatctgcacaaaatgatggtccatattctggatttatttaatttgaaatatttgaaatattttattatcatttacatttttacaattacagaaagacgggagtcatataggttgattttggtgaatggttttttttcacttttttttccctttcttttcttttatataaatatgctttgctttagcttcttctttttcatttagatttcattatttagattttattagctttttcgttttttagactttatagttagaataacttataaatattctttcatttattatcataaaactaccatcttagtatacaatcctacctattggtatataaaataatctaaattcaaagtaatacattgttgtgttcatctactggatgttcttcaatgattgtattatcaacaccaatattttcaacattatcacttgaactctcactattgtcacttcccacaggagtcttctctccagtatctttattggtatcactctttgttccatcatgtatataatgatcaacatgtctaggctttaccattaaaatcattaataataaaaatatcaataataccaaaaataaaacaattttacatttcctagtttgtctttgatatccttcagctttgtttaattgtttatgtgctccttgaacattttcagttgttctacttaaattatattcaatattatccaatatagtaccttgatcaatcacaatattctctaattctttgaaaatcatacttatttcaacaacattttgtgatattttataaatttctctttcacgttcaagtaaatattgttgatcatcaactaaactattttcttctctatttatttgtatttgactttgaccttgaccttgaccttgaccttgattttgcatttgtgatgattgtaactctatttgtttactactttcaagcattgcagttcttgaataactttctatatccttagaatcatcaactaatgaatcaaaattatccttaaattttccactactattagaatctaatatatcttcatcttttttcaaatatttaatatatttcccctgcatttctctaaattcaccacttaaactttgtgcaacagttgcaaatttctttttcaaattacttacaagtattctagttcctttaaaagtttctccattattaatatctttaaaacttccattgttaaattcattattctcatattccatttcttccaatgttttatctaatttctgtaattcattgataacattataaatcattctaatttcatcagttatacgattggatatatcattaacaatcttcatttcactttgaattaaatcatcatcaaattgtggtaataaaacttctctatacttttttcttaattgtttcatattctccttaatatgtttagttaaaccattaccttgattttcaatatcttgaattaaatctgtatatttatcaatattaatatttaaagatgtagaattatcattggaaccactgacaaattcatcaagttcaataccatcattgtattcatcattagatccaagtaatccctcttcttcttgtctcagtttattaaacctctgttccgtggtaactttcttctttaaatgtttggggaatgttttcctataggcaacatataaatttgttctatctctaatcattcaatggcttactattcctctaatagatgttcaataatcagaagaagacctttatcattaattatatcgataatcaatcccagcagtaaacatttaatcaaattcatcttttcattacgtaatttacaacatgtatttgagattataagtttaatgtttcagtgaatggatatattacaatacatacgttgttatacactattataaactaacgagagttattggaattggttgtaccttgataatagacaccaggagacataagaatatatctttccattgcttctctaaatctatttttatattgtttaggagtaataacagttggttccttaccaacaccagaattaccaactaaacctttttctttaacccaactttcaagttttttatcccatgtaaatgttctaatacaatcaattataccaacaattaattcatcctttgcatgatcaataccaacaactaatgaataatccataacattcattttctctaaaaataatgtatcattccataatgaagcacgtaataaccttttatcattttctttaataaataatggtgattcatagatatattcaaccatattttcatctaataaaacttcattctctttaccagtttgttcaacatgacgatttctcattgatccctttaaatcgaaaattctatcaattttcctatcataaaataaattttccataattaaaatatccattgtatatgatttagaatttggtaatgaattcttaacttgaatttgataaaatccaaaaatcttaactaaaacacttggtaaatcatgaaataatacatgtgcaaaatattcaaaataacttggtgcaaaatgaacaaatgcttctaattcagctttacttaattctttaataataaatctttgatctaaagttttcaagaatgctgatccacttttaccacccgctgaatcccacttaacacatcttgataaactttcaataaaattttcattgataccacatttccttcttaatgcatcaaattgttgcgtgaagaatattttacataaaatagtcgaataaccatcttcaaattgatatttcaaatggaatcctttcttaagcataatattttcaagttcagcatcaagatctttattattattagtaggattattagtaggattgttatcaatattaatatcattatttccattgttggtaatgttggtattattagtattatcgttgttagtagtaccatcattgatctcatcttctttaatttcttccttcatttcttcagtttcctttgatttttcagtattttcaacattttcattttgtatattagtcacattacttaatttaaattcataatcttttgtacttaaacaaaatgcaataattgaactaggttcatcttctctaacaataacatcagaatcaacaaaaatatgttcacttgaaattaaaggataagcaagtggttcccataaagttgcagatctatcagcccaaaaatgtgttaatgatttaagtaatgatatcttttcattttgagtttctctgttcttcttcttttccttttccttttccctctccctttctttctccttctctctttctttttccctttctttctctttctctttatccttttgtttctgcttctccttctctttctcaaatttttgattttcaataatgtcagtttcatttttaatttcatcgttattagttgtactttcagtaacgataagttcattagaatttttagagtttctaatcaaagctttatttgaagcttcagaattaacagcttctgtaacattcttataaatttcaattttaggtctcatagtattaactttaggtgtatatttattaaaacgatcaagtttttgtttatcaagttctctttgattaaaatattcttgtgtatcaaagaatttggtaagttccttaactttaccttcatctaaattttcattaactgttttatttggattaattgttaataaatcaactcctcctttaccattaagttcatgaattttatttaaaattaattgtcctttactatgacgacgaccaattgttttattcatatctgatttattcttattatcacctgatttctctaattcaccatagctttttctagatttattactgatatcagttcctgatttaagtgaaccttcttcagtatgttgttttaactctgatgattgatcctttatatcactttgagaaacttccttattatcagcgtcaacattttctgtggtatttagattgttcatatccttcgatacattttcttcttcactttcttcaccttcttcttcttcttcttcgtcttcctcgtcttcctcctcctcatcatcatcatcatcaaatttccctgcaatacttttaaataatctatctaattggaaagcagtaatctttttaacatccttttcacttggtaaatatttcttagcaaaattttgaaattcaatattccaaaaacttgataattcttgaacttcccttaaaactatattaagttttaaatgttgtttaatttgtgattgattatacattgtatctaacaataattcaatttctcctctttgtgagataactttttcctttaattgaataagttttaaattacctgattcaacttcatcaattgctaattcagtaccatccaatttaattcttttcaatctattgaaaactgaatcaaagaaattagaacttttaagtttaatatcattgaaattatccagtttgattttataatcatattttggattccataataatttgaatttaggaataattaactttaaattatcaatcttactatagacaaatttgactttataatttctgaaactgaaaaaatgtgtacaatctttaaagaaatcaaatgaatgttgtttattatccttacaatgacaatgtggagtattagttgtttcatcattattattgttattgttattattgtttaaaatttttaaatcaaattcattattaaaccaaaatattaattcaagatatttaccaaatgaatatttatatgaattatcacttaattgaagaattggagtttgttcattacaattattacaaacactccaagtcattatattattatgaattatatttgaatcatctaaatcaatgaatatatcaattttaccattatcatgaacataagatctataatgatctttaagtggtaattgacaattatcattacaaatattttctgaatttaaacaaataaattcaataaattgacctaaactaaaatcattttgccaataaaaatcaattaattgaatttcaggttcaatacatggagtaaaattttttttggaaatcatactaaataatacaacaatattttgattataatttggatcaaaatatgttaattctctatttttccaaaattgttcccatttctttaaataaaatagaatatcaacatttaaataattattcttataattaaagatttcattagcaattgaatcaatttcattttcattcccattcttaatttcgaaaatttcaccaaaatattctaattgttgatttatcttttcttcaaatgttaaacatttaaatttttcaaataatttaacattttcattaattttaaattttaaattttctaattccattaacactaatggtggtttaaactttatccaaggtgaagtacttatcaatctttcattaactaaactaataaaatcttcataatttttcaaattaattgaatataatgaagtaaattcaattttatttaaattctcagttaaaatcttttgaccttgaccattttgaattttcaaacattgatctcttaagaaacttgattctaattttaaattaacaaatgcatatatcataattgttaaagaatttttaactttatttaaaacatcattatttttatcccttaatagaattgttaaacctattttatttggacatttatcaaatttaacataattataaactaaatcattaaatttataatttaatactttgaaaattccacaagtacctaaatttggttttaatgcaagtatatcaattgaagttataattgttgaatttgtaaatttagataatttaattaaatttgataatttacaagatggtataacagttatatttttatctgagaataatttaattgcataattatttatttgtaaagttgaaacaattatatttggttttaaattactaattctatcaactaattttttaataaattcatattgttgagatattaaaggttctaaactttgaaaatgataagaatttgaattatcattatttgattgatcatattcaattggaaatgtaattaacataattttaggattttcaattaatgttggcattgatcttataggtaattttttagagaatacaataccttcaattattttagaattatttaatgatgaaccttgaatttttttaattttaatataatttgtaaaattataattagaatcatttaatgttgtagttgtattatcattaagattatttgatatatgttttaaattaatatcaataaaatgtaaatgtttaagtagtttaattaagatatttgaccattcattataatttgaaatatttttatcaattaatagttcatttaataatgaagatgaataaatttcaccaattttttgaaattcatcagagaatggtattacattggtaaagttattatttttaaaagatgaagttgatgatgatttaataagatgatcttcattaattggatcattataataatttaaatttttagaaatatttctattcctatatctaccacttatatttcttctcctatttgatttatgtaattgaggtggatgagttaagtttatattcatatttaaatttttatgtttataattaattgaatttttaggtaataatgaagaatcagttgaattaggccagctaaattgatgattattcataaatgatataagttgattttcatttgaagggggtataatttcaggagttggatctatgttattatttatagatgaaccagttgtattatgatatctatattgatctataatattattatcattaatgttattattaatattatttttgagacttttcttatcatcttcattattatcatcatcaaaatcataatcatcatcacttgaaaacatttcattattatatttttcagctaaattataacaaagatgacaaactctcatattaccattataattaaattttgaaccattaataaaagttgtacaatttgaacaaaaaattttaccacaaattctacaatgatgtttccttttaaaagttgtaaattttttatcacaagatttacaattaattgcagatgaatcatctaaccaataatctctaccaatacctgattttttcgttgtattggtgggtattgttgtatttgaagtatattttgataaattatcagataatttagttgatttatcattaatgttgatattatttatattattatttgaagaatgaatttgaatttgagattgtgatattgaaggtattgataaaggtttgaggtttaaatttaagtttatatttagattaggtctaggggtattagaaatgagtgaattaatgtcagataatgaatctgtcattgtttatttaaaagaaaggagtgatgaaagggtaatataaaaaaaggatatattaatataaaaatgatgaagtaatacgcccttattgaaaattcatgttaataatttattatagaagagttttattatagaagagtatttagagtatataaagagtagataaagagtatatgatataaagtatagattattcatcaaatactactttcttattaacactgggagttgatatagtgttattagtagtattattagtattagtattagtagtactaacatcatcgaaaagaggaggtaaacctcttaaacttctttgcatacgattaagttgagataatacagttggatttatcccactgtatgtagtagtattgttattattagtagtattattaagagtatttgaaggatgattatttataaattcatcaacatatgaaagtacggtttcatcttgtaggaaagtttgtgattggattggtttaaagagagttggtttagcggtatcatccttgatagctctgaatctttgaccctgtttagacattgttgtttactctccaagagaagataatataagtataaagctgtgataaaagatggaaagtaaaataaaataaaatttacttaataaaataaaatttttccccatagtaaagtcacgtgtaggatattatacgatattattagctatatacagagtaaggtatacaatatatacaatactagtgagttaggaaccaacgacctttctcaaaacgtctcttgacaatgtttctacctgaacgtgatttcattctagctaaaaatcctaatcttctctttctctttaaagtatttggttgatatgtattacctctattaccacctcttgatccaaatctttgttgcatgagaagaaattgtgaacttattaaacctcctgcaggggtggatgtgatggtactaaatgtacttctaactgtattggtgattaatgcaaacattgccactgtctaataaaagaagtaatagcagtaactgttaataatttcaaagaaatggaaaatttcactaacaattaaattttcgtggattatgtaatgttggacatggactcttaacagtatacttataactgcttcttcttagagtacacgacaatgtcagcagtatctgacttattcacttactctctgctaatggcagtatcctcctttatagctggattacccccattatggattatatcgtcaaataatcacaattattcttattccccctctttctcaatttcattacctattttactacatttaacttcaggtttattactttcaacttctctaacaatagtattacctgaagcaattataaatataccctatgatacccttatttcatcatcttctttaattgggtttcaaatcttattaggatttgtcctactttattcaattgatacattctctcagaaattaaataataacagtatagaatctattaatagtatagatactgatgaatcagatagttattatagcaatacatattctaatcatcatcataacaattacacttccaaacaattattcacatcagtacttacaaattcaacaactttaggtttattattacattgtattactgatggaattattttaacttcaacaattttatctcaaaataataataataaagataataaagaaaatactaaccttttcataatcataattgcattattcttacataaattaccagctgctttctcattaacttctattttattaaatcaacaaattgataatttaataattttattccatttattcctatttgcaatatctgctccaattggtgcttggttaagttattttatctataatattatatcatctgatactacatttgataatactttcatactcctatttagtacaggtgctttcatttatgttagtttccatactttcatttcatgtcatgatcattcaacaaataatgatattatcaacactgatgatacaattactgataaaccttcttctaattggaattattttgctacaattattggtatgataataccaattttagtatctctattacatgattaatacaaacaaacactatttactctctacgtacacgttttctatttaaccatttatccttttgatttaatatttgattatctctctttaatgaattattaatatcatttccatttaataatttaacatgaatatctccttcaacaactttttcttgtttatttctaatctctcttaatttctttaatttttcctcccttaaatgtttcttattaagtttagtaagtctattctcttcttctactgcattgaatgtaatcttcttaccagtaggttcttcattcttactattactcacactttcaagtaaattatcaggtaattcatcaggtaattcatcttcaatattatttaattcctttctttgcttctctaatatcttaatttctttctctaatttagcaatctttctcctttcttcattctctctctgtttattcttactttcttccttttgtttcttaagtatcttattttgttcattttgtttatttataatctttttcttggaaattgtaacattttcttcctctggtgcatcatcatcactatcactatcactaggttcactatgttcattattgtcctctacttgttctatttcttcaactttttcaattttttcaaattcagtagttgaatcatcaaatgttttatgtgatcttgttttaaccattgtttttgttctttctaaggaatttattagcaaagaatatcgtatactctaattaattatattatatagtaatataaacagaatttagaacttaaaacacaagcaaataaagtaaaacaaagtaagatatacaaaataaaataaatttgaaatttttttcatgcaatttttttttttcaccttccaatttcaatattcatttagaacattcaatgattcctaaccaacaaaagattgtattccaaatataacttagttgatcaatattacctgtaaaatatagaactatagtcataatggttaataatattaaaattgcaattaatatataaacttgaactggtgttaatgttgaaattgtttcactaatattgcctaaaaatgatttatttgtacaattagtagtagttatgatattattgtcaccattatcactattattaggaatactaccatattgagaatcataagcttcaatatcaacactaaatggatctttaccttgatgaattaataaagatttatttgcattagtttcatcattatctgataaaattgcattattaattgatgtaccagttattatcttactgttattatcattaataaactcattatattctacattatcacgttgttcatattttggtttgaatactttcttagaaattggtgattttttaacattactagtagtagtagtagtagaattattaacattacttacattacttacattactactaccaacctttttagattttggtgatttccttaaggcacttgttaatttcttagtatccatgacgttaattacagagtggttgttgatacaaataaaagaagaagaagaagaagagtaagataatagaataataatataaagaaaatagggcaatttaaactatacagaggtatacccaccatcaactattatatcagttcccgtggtataactacttgcatcacttgcaagataaacatatgcaccaacaatttcctttggattggccattctacccaatggaattgaattactccattgattaactaattgggggtccatcttttcaactaatttagttttaacatacccaggtgaaacactattaactctaattttaccattaccaatattagaccattcaattgataatgatttagataattgtctaatacctgccttaacaacattataaggagtttgtaattgtggtatattaattatatatcctgacattgaagatgttaaaattaatgaaccaaaaccttgtttggcaaatactttaccaataaatgcacaacaataataaactgatgataaatcaattttaataaatttttcccaattattaactaattcatcctttgatttaaaatcattaataccaccatttaaccatccaatacctgcatttgcaataaatatatcaattttaccaaattctttaattatagattgaatcatttcttcaatttcttcaacattatttaaattacattgatatgaagttattttaattttcgggaattcttcacttatttctttaattaattcatcaactggtgttgaattataaattataactatattaccattcattgatgcaaatcctttaactatttctaatccaattcctgatgatccacctgttataacacatgttttatcagttaatgaaaataattcattagttgtctttgttatattaggtatttctcttgttttaaacattggttagtttatgaagatgaacaagataataatattactattctataacggacattcaactctatatttataatcatataatctgtataatgccagtacaattttctgattacctttcccccacataatttttcatcttatcaaaaattgttgattacatttctatttcgtcatatatttattattaatactgttattagtttatctatttaagttatttaattattgtttgttatattgtattgtgttagattttaggtcatattattatgtagtttatagtatagatacttcactttagataattgtaatattctccactatttttcaacagtaagttttagatatcgtttctctactattgtatcattgtaattgtcgtctataatgtgtttaattagcaattattaacatattttccatctttaaaagaagaaaagtgataatgtcattgtaaaatttcaaaaaaattcattattgaccataaattttagtaaaatatggtaaattgtaagattattttttttatgaaaatattaacttctaacatgttcagcatgttatttgacccttgtttactgaatgtagaagaaaatatcatccaataattaattcaatccctgttaaaactatactatcaaaaatacgtcacgtgacacgcgcagaatgaggatccccaccgcatacaaaaaaataactaagccgttctagtatagtggtaagtacgcatcgttgtggccgatgagacccaggttcgattcctgggagcggcacaggcataataattaattttttacttgatattcatagcgcttaatattacccaatcgggtaacatttccccatttccccattttttaaaattttccaaataagtggtgaaatttttttccattcgatgggacatgatgattatttattataataacatgatattatgataatacgatattcttgtattaacatggcattttctttcttctcttttcttttctgtttctgttcctaactgtttcttttctttttagttaaataaacaaactatacttatagaacacttttaatatgaatattttaaatgactctcgagattgtcatatcggttcaaatcctttgaataaggtattaatctcaactaataataatgaacaatttaataatttaaataataatattactaatactactaataataatggtttcaactatattcaaaatgatccatctttacaaagagaatttaatgcatttgcaaattcaaataatcttgaaatgaatatgaatatgaatatgaactttatacctgaaaatattcaaatgaataataataataatattaataatcaacaacaacaacaacaacaacaacaagtttttccatcttcaataccatcatctcatcaaagtaattggataaatgattttaataaacttgatatcaataatactatgaataataatattattaatactaataatcagcatcaaaatttaaattataaccttaatcaacaaatacccaatagaaataaccaattaagaattaataatataccccttacaaaagcaaataatacttctgcaactattaattctactacaactacaactaatactactacttataatgataatttaaaatcttctaataatattctcttaaataatgcatttaatgatgtatttaatgaactggatttagaaattaataaagatattaataatattaataatcaaaatcaattagataatcaagatcaaacaaatttagttaatgatgaacaattaattgatgatactaataataatgtacataattttaataatgatgaagaagaaaaaatgaaatttgcaattttagctaaaaatgttttcaatacaatgaataatactccaaaacatatatcttcaaaaacttcaaataaatttaagaaaagtggttttatgcaattaatgaataaaatttcaaatcgtgaaattgaattaagtaatgataaaaaaaatttagttgatcatttaggtaataatattttaaatgacaaattacctgatcctttacaaaatattgatattaataaccttaatattaatgataatttaaatactccattcaatactgctaaattagtttcagatagtttaaatgttaatattaatacaaattcttggcaaggtgatttctcctaaataacttatttttaattattaattaattaattaaaattctttaatgttttattttcataatgggtttatataaaaaaaaagtttataaatttatatttcaatacaaatattccatcttctttttgaacatgctttaaaaaaaagttaggcggcaaaaaaaaatttcgttgcgagctatgtggatcgaacacatggcctccagatcttcagtctggcgctctcccactgagctaagcccgcttcggttgttttttaaatgctttgttgtttcccagctatacttaatcacgtgactgtttgcttggaacccttattaaacaaaataaactccaccatcaacggtatcatctataaccctctaaccacattcaccccatcaaccactctcagcaatttcacaaaaaaagtaaaaagtcaggcttttgctgatgatattatcactttcaaccaagactccatcgacatcaacaaaaccatccaaattttctctgaatttgaaaacataagtggtctaaaactcaatcaccaaaaaacaaaatgttgtaatctaacgactctttgggcaggatccatattttacaaaacaacagtattaaaagaacaaactatataaactataaaataactaagattatacaagggtgcatccagtaaaacgtcactgaacaatttttgatgtatttttttgttccttttttttgcgcgcgctgtctatttaattgcgccttttgaaaaattagacgcatttaatgcgtctaattttttttatgataataacgaaatgcccagtgggaaccctggtgggaaaatttttttactgggaaacctttgtgggcgaattttaggaaggtaaaaaacatacttttaattatttttacacgtcgatgagtctatatcaattatcttaggttaattacgacataagaacttctgcataaaagaaatttacaatttcaatttacatgtattaaataggtttatattaatcatttacatatcttacaacctattgtgtagtatgtgtcttacactgctaggttattttaaaaaaaaatacaaaagaatacgaggtcttgctgctgaaggtgaaatatgcaataaagagaggtgaatttgttttttttcctcacacgctaaagtaatagattgctaaaaaaggaaataacatcgatatgtggagaaattaattaagcgagcaatcattggctgatcgtgatgaccgatcttattttggcagactaaacgcgttgttgttgtttttgtcggttttgcctccaaatcgcccacttttttcaatctatgtttatttagttcttttctttcttgatcctgttttatggttgaaatacactacaatccttgctatttctctcatcttgatattccaaacgtcgagttcgaggatttaactaccaatacacttgacaactgtattacacagatttcaatacttttaggtcaatctgaataccttagaagcttaagaaataatccccctaatgatcttttgatttatgtttttcatcctaaagcacatgatgttcagctaaactcactatcagatgattgtacttatgcaggtttggttggtgcctttttgaagacacctcctctggcagaatttacttcacattgtacttctaccaaatttaaacacaggagaactgttttaatttttcctatttattcggaagctgatagtaatattattatgtttgttgtttttgatttatttcgaaatgagtactttgtgttttctccattttatgatatcaatttaaactatactaaaagggcagtttattcggaaagtcaatctattcatgaaagcattgtttcaagggttatttatataggtgatgtttttagattcattacaggtttatcggggtatcttaaaaaatattcaggaaacacaacttataagcatctctctgttgcctttcctgaatggataacaaattctccttggaagataagtgcagtaactaaaaagcatggagctcaaatgactgctttggaagaagactataaattcaatgtacatttactatttttccatagatttttagctatttgtccaattttaggtccaagagaaggacgtgagtcttcaatatcattaaaaacttttatggaaagaagtgatatgtttaatttcaagtttaccaatgacggtttctgtaacaaaacttcatattttggtatgcgtgaagctggtttttttgaattgttctcaagaatgtatgcatcctatttcaaaaataagcataacaaggtttcttctgtgcttttacctgttgatgaaattattcagtctgatgtttcttttgtgaagttattaaacataatgaatgagatggtacaaaagagtgctgatagtagtcggtttattgctgaagcggacaagaggatacacagagctcttaaaaaatcattgatattgtttgtgaaagctaatctcaataatattatgggtgccaattattacccttttatccaggaatatatatccgaagctacagatttgaagaagcatgttcagtctttgagtcaaaaaagaaaaagagctgttatggaagaaaatgatgaatttgttgatgatatttcgaatcctgttcgtagcagaaactctgatgatattttagatattgaaattgaggcatttaatgatgctgttgatcttcaccatatagtgtataatgtaaaaacactaagaaaacggacggaatggccgcagttatgatttttgtttttctagcgcgggccatctcgttttgacattcggtttttttttacaggtccttctcgttttttttcaaccgaatggaaattttagtagtgcgaagtatttattttttattttttcatgtcttactctactttttgtcaaaatattgtattttcaaaaataacttttgtaaaatgtcagtagataattggttgtggtgttgctggtctgactcagtttgacacggcaaacaaaaccatgtgagtggttagtctgtaagtggtctggttgtcgagatacacccccctaagtgagcaacattgaaatctgtcgtaaacagctgagccgcctaatcatggctattatgtaccacagctaatttcttgctttttaaagcttgcatgtgttctctacagtcagttgtatggtaaataaattttacatagtggaaaagtcgtctggttgtggagatacgggatgatgtcattttactgtattagtgttaattactatgttctttagtagaccctttttggcttctttctaatgcatgggtgcattttcagggtccacttatggtgtaacaggtttaacaatgccagaaaggcggctcgttgtcgagatagctactccgatgtccgagaatgcttatctgactttcttatctctgcctgttactccctttacggcttatttttttttctttttccacttacactatgtataaaaaatacaggagaacatgttcccatagacagaagcactaaaaaaaattatatccccacttcactgtgtacaagtgtctgaatccatagaaactgaaagcattttggaaaaagtagaccttgctcggctatttttgtttttaggccgcggacaccactctcggctcggctattttttccagctgctgccactttttgcttacgtaatattttttgtaaggtaatttttttacactgtgtagagggtaggtactatactagggtctgattacgtaatatttttttgaaataaatttaattaactttgttctctgtgtgacattgcccatcttaaaaattttgtgcttacgtaataatttagggtatacgtcaccacaccgcacactactgtgtgactgtttttcaattacttaaccctttttggcaaaattacctgtttaggaaaattaagtgctcgcggcaaacttttttttccccattttttttcaaaattttccttatccttatccgcacttttttcaattttttttcaaatttttcttatcttctatatattggggtgtctgctcttgtccactttttctcactttcagttcacttttttcttctctttcttcctgtttcctcctttacttttctcttgttttatttcttttaattcttttaattcttttaacaagcacatggtattgattagttacaagtttagttctgaaagactgtgagtggtttgcaatcatgtcaataatatagtgatgcatcctatgttatgaatggtttcattccggacgctggtttttattttttttgttctggaaagggcccgctctggaatgataatatggccacagtgttgattatactcgtatcctcaacttacacctctttgctggactttgcttagtaattgatttggtatttttgtgattatggtatgtttattaatttaaactttgcaagtgttgtctattaacttgcttggtggttgtaagaattaatttttctttttaattcttttgatggtctgtttaagaattaatgtttcttttttaattctttttgatgcttttctgtttgttaatttttggtttttgggtgctgttttagtggttaattttagctttttacatggtgttatgctgtccaatttttttgctgtatattatctgtttaattatttaataaatttatgtcttaatattaatttatgtcttattatcaattcaccatgtgaagtaggtcgcaggggggtatagtgaagtagtgaagtatagtgaagtagtgaagtagtgaagtagtgaagtaggtcgcaggggggtatagtgaagtagtgaagtaggtcgcaggggggggtatagtgaagtaggtcgcagggggggtatagtgaagtagatcgcagggggggtatagtgaagtaggtcgcaggggggggtcgcagggggggtatagtgaagtagatcgcaggggggtatagtgaagtaggtcgcagggggggtatagtgaagtaggtcgcagggggggtatagtgaagtaggtcgcagggggggtatagtgaagtaggtcgcaggggggggtatagtgaagtaggtcgcagggggggtatagtgaagtaggtcgcaggggggggtatagtgaagtaggtcgcagggggggtatagtgaagtaggtcgcaggggggtatagtgaagtagatcgcagggggggtatagtgaagtaggtcgcagggggggtatagtgaagtaggtcgcaggggggtatagtgaagtaggtcgcaggggggtatagtgaagtaggtcgcagggggggtatagtgaagtaggtcgcagggggggtatagtgaagtaggtcgcaggggggtatagtgaagtaggtcgcagggggggtatagtgaagtaggtcgcagggggggtatagtgaagtaggtcgcaggggggtatagtgaagtaggtcgcagggggggtatagtgaagtaggtcgcagggggggtatagtgaagtaggtcgcagggggggtatagtgaagtaggtcgcagggggggtatagtgaagtaggtcgcagggggggtatagtgaagtaggtcgcagggggggtatagtgaagtaggtcgcagggggggtatagtgaagtaggtcgcagggggggtatagtgaagtaggtcgcagggggggtatagtgaagtagatcgcagggggggtatagtgaagtaggtcgcagggggggtatagtgaagtaggtcgcagggggggtatagtgaagtaggtcgcagggggggtatagtgaagtaggtcgcaggggggtatagtgaagtaggtcgcagggggggtatagtgaagtaggtcgcagggggggtatagtgaagtaggtcgcaggggggggggtatagtgaagtaggtcgcaggggggggtatagtgaagtaggtcgcaggggggggtatagtgaagtaggtcgcaggggggggtatagtgaagtaggtcgcagggggggtatagtgaagtaggtcgcaggggggtatagtgaagtaggtcgcagggggggtatagtgaagtaggtcgcaggggggggtatagtgaagtaggtcgcagggggggtatagtgaagtaggtcgcagggggggtatagtgaagtaggtcgcaggggggtatagtgaagtaggtcgcagggggggtatagtgaagtaggtcgcaggggggggtatagtgaagtaggtcgcagggggggtatagtgaagtaggtcgcaggggggtatagtgaagtaggtcgcaggggggggtatagtgaagtaggtcgcagggggggtatagtgaagtaggtcgcagggggggtatagtgaagtaggtcgcaggggggggtatagtgaagtaggtcgcagggggggtatagtgaagtaggtcgcaggggggtatagtgaagtagtgaagtaggtcgcaggggggggtatagtgaagtaggtcgcagggggggtatagtgaagtaggtcgcagggggggtatagtgaagtaggtcgcaggggggtatagtgaagtaggtcgcagggggggtatagtgaagtagatcgcagggggggtatagtgaagtaggtcgcaggggggggtatagtgaagtagatcgcagggggggggtcgcagggggggtatagtgaagtaggtcgcagggggggtatagtgaagtaggtcgcagggggggtatagtgaagtaggtcgcagggggggtatagtgaagtaggtcgcaggggggggggggtatagtgaagtaggtcgcaggggggggtatagtgaagtaggtcgcaggggggggtatagtgaagtaggtcgcagggggggtatagtgaagtaggtcgcagggggggtatagtgaagtaggtcgcagggggggtatagtgaagtaggtcgcagggggggtatagtgaagtaggtcgcagggggggtatagtgaagtaggtcgcaggggggggtatagtgaagtaggtcgcaggggggggggtatagtgaagtaggtcgcaggggggggggtatagtgaagtaggtcgcagggggggtatagtgaagtaggtcgcagggggggtatagtgaagtagatcgcagggggggtatagtgaagtaggtcgcagggggggtatagtgaagtaggtcgcaggggggggtatagtgaagtagatcgcaggggggtatagtgaagtaggtcgcagggggggtatagtgaagtaggtcgcagggggggtatagtgaagtaggtcgcagggggggtatagtgaagtagatcgcaggggggggtatagtgaagtaggtcgcagggggggtatagtgaagtaggtcgcagggggggggtatagtgaagtaggtcgcaggggggtatagtgaagtaggtcgcagggggggtatagtgaagtaggtcgcagggggggtatagtgaagtaggtcgcagggggggtatagtgaagtaggtcgcagggggggtatagtgaagtaggtcgcagggggggtatagtgaagtaggtcgcaggggggggtatagtgaagtaggtcgcagggggggtatagtgaagtaggtcgcagggggggtatagtgaagtaggtcgcagggggggtatagtgaagtaggtcgcagggggggtatagtgaagtaggtcgcaggggggggtatagtgaagtaggtcgcagggggggtatagtgaagtaggtcgcaggggggggtatagtgaagtaggtcgcagggggggtatagtgaagtaggtcgcagggggggtatagtgaagtaggtcgcagggggggtatagtgaagtaggtcgcagggggggggtatagtgaagtaggtcgcagggggggtatagtgaagtaggtcgcagggggggtatagtgaagtaggtcgcagggggggtatagtgaagtaggtcgcagggggggtatagtgaagtaggtcgcaggggggtatagtgaagtaggtcg

SEQ ID NO: 23 - DNA, 32729 bp, Pichia kluyveri
  >NCYC246_000014F P_kluyveri_NCYC246_TS
gattcggtaagcgttggattgttcacccactaatagggaacgtgagctgggtttagaccgtcgtgagacaggttagttttaccctactgatgaatgttgtcgcaatagtaattgaacttagtacgagaggaaccgttcattcagataattggtttttgcggctgtctgagcagacactgccgcgaagctaccatctgctggataatggctgaacgcctctaagtcagaatccatgctagaacgcgacgattacttgccctcgcacatttgagaaggataagaataaggcacttgtgtcgcagaaccgtagtaggtcggcagcggtgcgcgtggcggaaaggctgcgtgtgcttgccggcggatggcaatgtcaggatgcgcgaggataaatcctttgcatacgacttagatgtacaacggggtattgtaagcagtagagtagccttgttgttacgatctgctgagattaagcctctgttgtccgatttgttgcttcggcggcgaagttgcagtttgcagatgcgagctgggtatttcggcgagatttggggatgccggcgtggccgggtggtgggcgatgctgttgggtgccattaattcctagtccgtggcttggtgtatggtatacgtgaggacgggggtggtggatttgggtcgatcgtctgggtaggcatattttacctgttttggacttaggattttttcaaataatgtcagacgggatttatgcttacgtaagggaggagagtggtagggtagggattattgattacataaggagaatagctatgatgtcagaggagattaagacttatgattacgtagtgtagtgattacataagacgtacagtggcccgcggagattaagacttatgattacgtagtgtagtgattacttaagatgtacagtggagattagtatagacctgtagacttgtgcttagttaattaagacttgattactgaattagttatgaagtggtgagcgcaataacacgtgagatgactccagtgattcaatcacgtgaataagtagaagtcaagacacagagtcatattaaagaaccaaagagaagaagagtcagagggagttgactctggagaaagaatcacgtgcggacagaggggtttggggaaaaaagggctgggaacgtcccaaagaggcaagtgacgcacagaaattagggaaatatggtggtgaaaaattttcactgcacggctgtagcacgaaaattagtatgtagagacgcaacgacccgaaaaaagagctaaaaagtaaaaaacgcactttttggaaattattaagaaagtaatttattttacacctagaggtcaaaatatgggatttttgactaactttgaacgcttatatctggacaaccagagcaggtatgcactagtgtagggtatgggtgtgaagcctgaatttttgtgcgcatgtaggtatatgtagtgtgtagaatgactgcgggagtaagaagatagtaaacagaaggtgataacggacataaccaaaagacaacgaaagtggtgtcgtggcggcttggcgtggcggctcagcacactgatagcggctcagcagcgtacgataagaaaaaagtcgaggggctcgtgagaaaaaacaattttttcgactcgacgaaaagtggaaaaatgtggcggtggcgggtggcggtgcaggcagtagtggcgcatgcggtgcctgtggcgcagcggaaaattgggttcggaaaattggcgcgcgtggtgaaaagtgacgagcctccgcaaaattgggttcggaaatttgagaaatttttgaaagtgacgagcctccggaattttgggttcggaaatttggcgagaaattctgaaaaagatgagcctccgtaaaaaagtgacgagcctccgcaaaattgggttcggaaaattggcgagaaattctgaaaaagatgagcctccgtaaaaaagtgacgagcctccacgagagaaatgcgccgcaaaaaataatacgcaatacgccacaggaaaatacactactatgaaaaatactatgaaaaaaaaagattgcagcacctgagtttcgcatatggtctcccactacactactcggtcaggctcttagcagcttaactacagttgatcggacgggaaacggtgctttctgctagatatggccgcaaccgacagtgttcgatttcgggcggtattatggatgtcaaaatgaaaaaggccttttttctcgggctacagacgtgctgaggacacgagacccagtgcgttggaatcggattgttcaggagtatctgtgtaaattttatggaggcaaaagaaggggtgaaaatatgatttttttttttcatgggaggtaagtgaagaatttcattgggaatatgtgtgttgatggatgtactagttggaagaagtattttttatgttgttttttttgactttttagagttggatgggcaacagagagcgtagaatatagtggtaaagatttaacatgggcatattttagcgtattggaggagttagaagggtaaagtgtgatatgggtacaacagggagggtgtaataaaaaacaaagtatgttctttttgatgatattatatgcttgatgtggagatccagtggtgtttattatgaaataaaattatcaaagcgaaagacgcactggttgtggagaaataaataggtgaagttagtagagtgccaagttcaacagtgaatatctcgacaaccacgccagctagagacatgccttgtagatagttttgatcagcgtgttttactctctaggagcagtgtttaacatgggcataatggaaattggccaaaaccaaagttcatctggagagaagtggtttcatgggcaagttgactgggagtgcccagtggagctgtgcccagtgaagaggcccttcgtgggcaagcagacaaattgtgtgagtacttggctggaaattttggcaaagtgagaaaaatgcacagcgagggtgttcactggggagttgcccagtagacattttttcatgggcagctgccgggtagaaacccaatatgagaaatttcaaaatcactaagtcaggattctgagagtggtaggaggtacaagaggccagggagagtagagaacagagattggaattggaaaatccggcctgagaggggagttacggggggtgttggtattgttgcccagtgaagtgggaatttcgtgggaagtagactgtgagagttttgaattttttttaaattttgagattcgctgggaagattgaaagtttttgtcgggcaagtattacattccatgggcagtgcccagtgaaggaaaacacacatcaaaatttcctagtttctgtcctattgcttagttacaaagatatgttgatcaggatgctctgtatagtgtgccatgtaattatgaaggtgtaggaaggcatattgggcaagtttgcaaaatgggatttgttagaaatgcatgcacggctgacggctcagcagcattgacaaaaagaaaaacttcacctcgcgctcgaaaacattgcacgccaaaacgaagtccaatttaactcctggacgccgcggccaacgcgcgctgcgaatttttggcaagattacgcagtccgggggatatacatgagaaaagcacttaaaaaatgcggttcttagcggtgttgtgcaccgataggccaagatcccacggagagtatgcaggggcgtctacggacaagcttgggtatggccggggacaagagacgcaagtcttggacaggggcattgtggtcttgcgaccgtggtgcgcactgacggggccggtgggttgctagctgatagccagcggaccactaggtttattggggacggggttggagatgtagccgtgcaaacgtgacatctgggaccactctccactgaagcggacgaagctgtactttgtacaggggacctccgttgaagaaagtcaaacagtgctatgtgtaggttaatccaatcatcataacaaaactcatctgagcgtagttatctggttgatcctgccagtagtcatatgcttgtctcaaagattaagccatgcatgtctaagtataagcattatacggtgaaactgcgaatggctcattaaatcagttatcgtttatttgatagttccgttctacatggataaccgtggaaaatctagagctaatacatgcgtaaagccccgacttcgggaggggtgtatttattagataaaaaatcaatgccctcgggccttttgatgattcataataacttttcgaagctcatggcctttgtgctggagctggttcattcaaatttctgccctatcaactttcgatggtaggatagaggcctaccatggttttcacgggtaacggggaataagggttcgattccggagagggagcctgagaaacggctaccacatccaaggaaggcagcaggcgcgcaaattacccaatcctgacacagggaggtagtgacaatatataacgatacagggccattggtcttgtaattggaatgagtacaatgtaaataccttaacgaggaacaattggagggcaagtctggtgccagcagccgcggtaattccagctccaatagcgtatattaaagttgttgcagttaaaaagctcgtagttgaactttgggcctgggcgggcggtctacctatggtaagtactgttgcggccgggtcttttccttctggctaactcttcggagtgaaccaggacgattactttgaggaaattagagtgttcaaagcaggcctttgctcggatatattagcatggaataatagaataggacgttatggttctattttgttggtttctaggaccatcgtaatgattaatagggacggtcgggggcatcagtattcagttgtcagaggtgaaattcttggattaactgaagactaactactgcgaaagcatttgccaaggacgttttcattaatcaagaacgaaagttaggggatcgaagatgatcagataccgtcgtagtcttaaccataaactatgccgactagggatcgggtggcgcttcttgcccactcggcaccttacgagaaatcaaagtctttgggttctggggggagtatggttgcaaggctgaaacttaaaggaattgacggaagggcaccaccaggagtggagcctgcggcttaatttgactcaacacggggaaactcaccaggtccagacgtaataaggattgacaagctagagacttctcttgatcttacgggtggtggtgcatggccgtttttagtccttggagtgatttgtctgcttaattgcgataacggacgagaccttaacctgctaaatagggctgcgagcatctgctcgtgggctcttcttagagggactatgggtttcaaacccatggaagtttgaggcaacaacaggtctgtgatgcccttagacgttctgggccgcacgcgcgctacactgacggagccagcaagtatatccttggtcgagaggcccgggtaatctcgtgaaactccgtcgtgctggggatagagcattgtaatttttgctcttcaacgaggaattcctagtaagcgcaagtcatcagcttgcgttgattacgtccctgccctttgtacacaccgcccgtcgctactaccgattgaatggcttagtgaggctccaagattggcgccgcgggaggggcaactttcccatggcgctgaaaattcagtcaaacttggtcatttagaggtcgtaaaagtcgtaacaaggtttccgtaggtgaacctgcggaaggatcattactgtgatttatatcttatacacatgcgtgagcgcaccaaacacctaaaattgtaataataccagtcactaagttttaacaaaacaaaactttcaacaacggatctcttggttctcgcatcgatgaagagcgcagcgaaatgcgatacctagtgtgaattgcagccatcgtgaatcatcgagttcttgaacgcacattgcgccccatggtattccatggggcatgcctgtctgagcgtcgtttccttcttgcgcaagcagagttgagaacaggctatgcctttttcgaaatggaacgtcgtggacgaagtgaactaaattattggaacgctttggccgccgaacttttaactaagctcgacctcagatcaggtaggaatacccgctgaacttaagcatatcaataagcggaggaaaagaaaccaacagggattgcctcagtagcggcgagtgaagcggcaagagctcagatttgaaatctcacctagtgtgcgagttgtaaattgcaggttggagtctcgggttagacgtgtgtgcaagtcccttggaacagggtgccactgagggtgagagccccgtatcgtgcatgtcgacacctgtgaggcccttctgacgagtcgagttgtttgggaatgcagctctaagtgggtggtaaattccatctaaggctaaatattggcgagagaccgatagcgaacaagtactgtgaaggaaagatgaaaagcactttgaaaagagagtgaaacagcacgtgaaattgttgaaagggaagggtattgggctcgacatgggatttacgcatcgttgcctctcgtgggcggcgctctgggtttttcctgggccagcatcggttttcgttgcaggataaggacaattggaatgtggctcctcggagtgttatagccttttgtagatgctgcgtatggggaccgagggctgcggcggactcgtttcgtctcggatgctggcacaacggcgcaataccgcccgtcttgaaacatggaccaaggagtctaacgtctatgcgagtgtttgggtgtaaaacccgtacgcgtaatgaaagtgaacgtaggtcggaccgctctctcgggggcgggcacgatcgaccgatcctgatgtttatcggatggatttgagtaagagcatagctgttgggacccgaaagatggtgaactatgcctgaatagggtgaagccagaggaaactctggtggaggctcgtagcggttctgacgtgcaaatcgatcgtcgaatttgggtataggggcgaaagactaatcgaaccatctagtagctggttcctgccgaagtttccctcaggatagcagaagctcgtatcagttttatgaggtaaagcgaatgattagacgtctcggggtcgaaatgaccttagcgtattctcaaactttaaatatgtaagaagtccctgttgctttattgaacgcggacgtttgaatgcagagcttttagtgggccatttttggtaagcagaactggcgatgcgggatgaaccgaacgcaaagttaaggtgccggaatgcacgctcatcagacaccacaaaaggtgttagttcatccagacagccggacggtggccatggaagtcggaatccgctaaggagtgtgtaacaactcaccggccgaatgaactagccctgaaaatggatggcgctcaagcgtgttacctatactttgccgccatggcgtgatgccttggcgagtaggcaggcgtgggggtttgtgacgaagccttgggcgtgagcctgggtcgaacggcccctagtgcagatcttggtggtagtagcaaatattcaaatgagaactttgaagactgaagtggggaaaggttccgcgtcaacagcagttggacgcgggttagtcgatcctaagagatggggaagctccgtttcaacgtgtgcaattctttgcaccaccatcgaaagggaatccggttaaaattccggaacttggatgtggattcttcacggcaacgtaacagaatgcggagacgccggcgggagccctgggaggagttttcttttcttcttaacagcttatcaccctggaattggtttatccggagagggggtcttatggctggaagagcgtcgcctttgtttgcgacgtccggtgcgcttgcgacggtccttgaaaatccgcaggaaggaatagttttcacgccaagtcgtactcataaccgcagcaggtctccaaggttaacagcctctagttgatagaataatgtagataagggaagtcggcaaaatagatccgtaacttcgggataaggattggctctaagggttgggtggatgtgcttcctgtgctggccatgcgtgctggcgctgcttcttcgggggcggtgctgctagctacgcttgcgcttgcggcctccacggttaacaaccaacttagaactggtacggacaaggggaatctgactgtctaattaaaacatagcattgcgatggtcagaaagtgatgttgacgcaatgtgatttctgcccagtgctctgaatgtcaaagtgaagaaattcaaccaagcgcgggtaaacggcgggagtaactatgactctcttaaggtagccaaatgcctcgtcatctaattagtgacgcgcatgaatggattaacgagattcccactgtccctatctactatctagcgaaaccacagccaagggaacgggcttggcagaatcagcggggaaagaagaccctgttgagcttgactctagtttgacattgtgaaaagacatagagggtgtagcataagtgggagctccggcgccagtgaaataccactacctttatcgtttttttacttattcaatgaagcggagctggtcttgacgaccacgttctagtgcgaaggcatcttgtgtgccgatccgggttgatgacattgtcaggtggggagtttggctggggcggcacatctgttaaacgataacgcagatgtcctaagggggactcatggagaacagaaatctccagtagaacaaaagggtaaaagtccccttgattttgattttcagtgtgaatacaaaccatgaaagtgtggcctatcgatcctttagtccctcggaatttgaggctagaggtgccagaaaagttaccacagggataactggcttgtggcagtcaagcgctcatagcgacattgctttttgattcttcgatgtcggctcttcctatcataccgaagcagaattcggtaagcgttggattgttcacccactaatagggaacgtgagctgggtttagaccgtcgtgagacaggttagttttaccctactgatgaatgttgtcgcaatagtaattgaacttagtacgagaggaaccgttcattcagataattggtttttgcggctgtctgagcagacactgccgcgaagctaccatctgctggataatggctgaacgcctctaagtcagaatccatgctagaacgcgacgattacttgccctcgcacatttgagaaggataagaataaggcacttgtgtcgcagaaccgtagtaggtcggcagcggtgcgcgtggcggaaaggctgcgtgtgcttgccggcggatggcaatgtcaggatgcgcgaggataaatcctttgcatacgacttagatgtacaacggggtattgtaagcagtagagtagccttgttgttacgatctgctgagattaagcctctgttgtccgatttgttgcttcggcggcgaagttgcagtttgcagatgcgagctgggtatttcggcgagatttggggatgccggcgtggccgggtggtgggcgatgctgttgggtgccattaattcctagtccgtggcttggtgtatggtatacgtgaggacgggggtggtggatttgggtcgatcgtctgggtaggcatattttacctgttttggacttaggattttttcaaataatgtcagacgggatttatgcttacgtaagggaggagagtggtagggtagggattattgattacataaggagaatagctatgatgtcagaggagattaagacttatgattacgtagtgtagtgattacataagacgtacagtggcccgcggagattaagacttatgattacgtagtgtagtgattacttaagatgtacagtggagattagtatagacctgtagacttgtgcttagttaattaagacttgattactgaattagttatgaagtggtgagcgcaataacacgtgagatgactccagtgattcaatcacgtgaataagtagaagtcaagacacagagtcatattaaagaaccaaagagaagaagagtcagagggagttgactctggagaaagaatcacgtgcggacagaggggtttggggaaaaaagggctgggaacgtcccaaagaggcaagtgacgcacagaaattagggaaatatggtggtgaaaaattttcactgcacggctgtagcacgaaaattagtatgtagagacgcaacgacccgaaaaaagagctaaaaagtaaaaaacgcactttttggaaattattaagaaagtaatttattttacacctagaggtcaaaatatgggatttttgactaactttgaacgcttatatctggacaaccagagcaggtatgcactagtgtagggtatgggtgtgaagcctgaatttttgtgcgcatgtaggtatatgtagtgtgtagaatgactgcgggagtaagaagatagtaaacagaaggtgataacggacataaccaaaagacaacgaaagtggtgtcgtggcggcttggcgtggcggctcagcacactgatagcggctcagcagcgtacgataagaaaaaagtcgaggggctcgtgagaaaaaacaattttttcgactcgacgaaaagtggaaaaatgtggcggtggcgggtggcggtgcaggcagtagtggcgcatgcggtgcctgtggcgcagcggaaaattgggttcggaaaattggcgcgcgtggtgaaaagtgacgagcctccgcaaaattgggttcggaaatttgagaaatttttgaaagtgacgagcctccggaattttgggttcggaaatttggcgagaaattctgaaaaagatgagcctccgtaaaaaagtgacgagcctccgcaaaattgggttcggaaaattggcgagaaattctgaaaaagatgagcctccgtaaaaaagtgacgagcctccacgagagaaatgcgccgcaaaaaataatacgcaatacgccacaggaaaatacactactatgaaaaatactatgaaaaaaaaagattgcagcacctgagtttcgcatatggtctcccactacactactcggtcaggctcttagcagcttaactacagttgatcggacgggaaacggtgctttctgctagatatggccgcaaccgacagtgttcgatttcgggcggtattatggatgtcaaaatgaaaaaggccttttttctcgggctacagacgtgctgaggacacgagacccagtgcgttggaatcggattgttcaggagtatctgtgtaaattttatggaggcaaaagaaggggtgaaaatatgattttttatttttcatgggaggtaagtgaagaatttcattgggaatatgtgtgttgatggatgtactagttggaagaagtattttttatgttgttttttttgactttttagagttggatgggcaacagagagcgtagaatatagtggtaaagatttaacatgggcatattttagcgtattggaggagttagaagggtaaagtgtgatatgggtacaacagggagggtgtaataaaaaacaaagtatgttctttttgatgatattatatgcttgatgtggagatccagtggtgtttattatgaaataaaattatcaaagcgaaagacgcactggttgtggagaaataaataggtgaagttagtagagtgccaagttcaacagtgaatatctcgacaaccacgccagctagagacatgccttgtagatagttttgatcagcgtgttttactctctaggagcagtgtttaacatgggcataatggaaattggccaaaaccaaagttcatctggagagaagtggtttcatgggcaagttgactgggagtgcccagtggagctgtgcccagtgaagaggcccttcgtgggcaagcagacaaattgtgtgagtacttggctggaaattttggcaaagtgagaaaaatgcacagcgagggtgttcactggggagttgcccagtagacattttttcatgggcagctgccgggtagaaacccaatatgagaaatttcaaaatcactaagtcaggattctgagagtggtaggaggtacaagaggccagggagagtagagaacagagattggaattggaaaatccggcctgagaggggagttacggggggtgttggtattgttgcccagtgaagtgggaatttcgtgggaagtagactgtgagagttttgaattttttttaaattttgagattcgctgggaagattgaaagtttttgtcgggcaagtattacattccatgggcagtgcccagtgaaggaaaacacacatcaaaatttcctagtttctgtcctattgcttagttacaaagatatgttgatcaggatgctctgtatagtgtgccatgtaattatgaaggtgtaggaaggcatattgggcaagtttgcaaaatgggatttgttagaaatgcatgcacggctgacggctcagcagcattgacaaaaagaaaaacttcacctcgcgctcgaaaacattgcacgccaaaacgaagtccaatttaactcctggacgccgcggccaacgcgcgctgcgaatttttggcaagattacgcagtccgggggatatacatgagaaaagcacttaaaaaatgcggttcttagcggtgttgtgcaccgataggccaagatcccacggagagtatgcaggggcgtctacggacaagcttgggtatggccggggacaagagacgcaagtcttggacaggggcattgtggtcttgcgaccgtggtgcgcactgacggggccggtgggttgctagctgatagccagcggaccactaggtttattggggacggggttggagatgtagccgtgcaaacgtgacatctgggaccactctccactgaagcggacgaagctgtactttgtacaggggacctccgttgaagaaagtcaaacagtgctatgtgtaggttaatccaatcatcataacaaaactcatctgagcgtagttatctggttgatcctgccagtagtcatatgcttgtctcaaagattaagccatgcatgtctaagtataagcattatacggtgaaactgcgaatggctcattaaatcagttatcgtttatttgatagttccgttctacatggataaccgtggaaaatctagagctaatacatgcgtaaagccccgacttcgggaggggtgtatttattagataaaaaatcaatgccctcgggccttttgatgattcataataacttttcgaagctcatggcctttgtgctggagctggttcattcaaatttctgccctatcaactttcgatggtaggatagaggcctaccatggttttcacgggtaacggggaataagggttcgattccggagagggagcctgagaaacggctaccacatccaaggaaggcagcaggcgcgcaaattacccaatcctgacacagggaggtagtgacaatatataacgatacagggccattggtcttgtaattggaatgagtacaatgtaaataccttaacgaggaacaattggagggcaagtctggtgccagcagccgcggtaattccagctccaatagcgtatattaaagttgttgcagttaaaaagctcgtagttgaactttgggcctgggcgggcggtctacctatggtaagtactgttgcggccgggtcttttccttctggctaactcttcggagtgaaccaggacgattactttgaggaaattagagtgttcaaagcaggcctttgctcggatatattagcatggaataatagaataggacgttatggttctattttgttggtttctaggaccatcgtaatgattaatagggacggtcgggggcatcagtattcagttgtcagaggtgaaattcttggattaactgaagactaactactgcgaaagcatttgccaaggacgttttcattaatcaagaacgaaagttaggggatcgaagatgatcagataccgtcgtagtcttaaccataaactatgccgactagggatcgggtggcgcttcttgcccactcggcaccttacgagaaatcaaagtctttgggttctggggggagtatggttgcaaggctgaaacttaaaggaattgacggaagggcaccaccaggagtggagcctgcggcttaatttgactcaacacggggaaactcaccaggtccagacgtaataaggattgacaagctagagacttctcttgatcttacgggtggtggtgcatggccgtttttagtccttggagtgatttgtctgcttaattgcgataacggacgagaccttaacctgctaaatagggctgcgagcatctgctcgtgggctcttcttagagggactatgggtttcaaacccatggaagtttgaggcaacaacaggtctgtgatgcccttagacgttctgggccgcacgcgcgctacactgacggagccagcaagtatatccttggtcgagaggcccgggtaatctcgtgaaactccgtcgtgctggggatagagcattgtaatttttgctcttcaacgaggaattcctagtaagcgcaagtcatcagcttgcgttgattacgtccctgccctttgtacacaccgcccgtcgctactaccgattgaatggcttagtgaggctccaagattggcgccgcgggaggggcaactttcccatggcgctgaaaattcagtcaaacttggtcatttagaggtcgtaaaagtcgtaacaaggtttccgtaggtgaacctgcggaaggatcattactgtgatttatatcttatacacatgcgtgagcgcaccaaacacctaaaattgtaataataccagtcactaagttttaacaaaacaaaactttcaacaacggatctcttggttctcgcatcgatgaagagcgcagcgaaatgcgatacctagtgtgaattgcagccatcgtgaatcatcgagttcttgaacgcacattgcgccccatggtattccatggggcatgcctgtctgagcgtcgtttccttcttgcgcaagcagagttgagaacaggctatgcctttttcgaaatggaacgtcgtggacgaagtgaactaaattattggaacgctttggccgccgaacttttaactaagctcgacctcagatcaggtaggaatacccgctgaacttaagcatatcaataagcggaggaaaagaaaccaacagggattgcctcagtagcggcgagtgaagcggcaagagctcagatttgaaatctcacctagtgtgcgagttgtaaattgcaggttggagtctcgggttagacgtgtgtgcaagtcccttggaacagggtgccactgagggtgagagccccgtatcgtgcatgtcgacacctgtgaggcccttctgacgagtcgagttgtttgggaatgcagctctaagtgggtggtaaattccatctaaggctaaatattggcgagagaccgatagcgaacaagtactgtgaaggaaagatgaaaagcactttgaaaagagagtgaaacagcacgtgaaattgttgaaagggaagggtattgggctcgacatgggatttacgcatcgttgcctctcgtgggcggcgctctgggtttttcctgggccagcatcggttttcgttgcaggataaggacaattggaatgtggctcctcggagtgttatagccttttgtagatgctgcgtatggggaccgagggctgcggcggactcgtttcgtctcggatgctggcacaacggcgcaataccgcccgtcttgaaacatggaccaaggagtctaacgtctatgcgagtgtttgggtgtaaaacccgtacgcgtaatgaaagtgaacgtaggtcggaccgctctctcgggggcgggcacgatcgaccgatcctgatgtttatcggatggatttgagtaagagcatagctgttgggacccgaaagatggtgaactatgcctgaatagggtgaagccagaggaaactctggtggaggctcgtagcggttctgacgtgcaaatcgatcgtcgaatttgggtataggggcgaaagactaatcgaaccatctagtagctggttcctgccgaagtttccctcaggatagcagaagctcgtatcagttttatgaggtaaagcgaatgattagacgtctcggggtcgaaatgaccttagcgtattctcaaactttaaatatgtaagaagtccctgttgctttattgaacgcggacgtttgaatgcagagcttttagtgggccatttttggtaagcagaactggcgatgcgggatgaaccgaacgcaaagttaaggtgccggaatgcacgctcatcagacaccacaaaaggtgttagttcatccagacagccggacggtggccatggaagtcggaatccgctaaggagtgtgtaacaactcaccggccgaatgaactagccctgaaaatggatggcgctcaagcgtgttacctatactttgccgccatggcgtgatgccttggcgagtaggcaggcgtgggggtttgtgacgaagccttgggcgtgagcctgggtcgaacggcccctagtgcagatcttggtggtagtagcaaatattcaaatgagaactttgaagactgaagtggggaaaggttccgcgtcaacagcagttggacgcgggttagtcgatcctaagagatggggaagctccgtttcaacgtgtgcaattctttgcaccaccatcgaaagggaatccggttaaaattccggaacttggatgtggattcttcacggcaacgtaacagaatgcggagacgccggcgggagccctgggaggagttttcttttcttcttaacagcttatcaccctggaattggtttatccggagagggggtcttatggctggaagagcgtcgcctttgtttgcgacgtccggtgcgcttgcgacggtccttgaaaatccgcaggaaggaatagttttcacgccaagtcgtactcataaccgcagcaggtctccaaggttaacagcctctagttgatagaataatgtagataagggaagtcggcaaaatagatccgtaacttcgggataaggattggctctaagggttgggtggatgtgcttcctgtgctggccatgcgtgctggcgctgcttcttcgggggcggtgctgctagctacgcttgcgcttgcggcctccacggttaacaaccaacttagaactggtacggacaaggggaatctgactgtctaattaaaacatagcattgcgatggtcagaaagtgatgttgacgcaatgtgatttctgcccagtgctctgaatgtcaaagtgaagaaattcaaccaagcgcgggtaaacggcgggagtaactatgactctcttaaggtagccaaatgcctcgtcatctaattagtgacgcgcatgaatggattaacgagattcccactgtccctatctactatctagcgaaaccacagccaagggaacgggcttggcagaatcagcggggaaagaagaccctgttgagcttgactctagtttgacattgtgaaaagacatagagggtgtagcataagtgggagctccggcgccagtgaaataccactacctttatcgtttttttacttattcaatgaagcggagctggtcttgacgaccacgttctagtgcgaaggcatcttgtgtgccgatccgggttgatgacattgtcaggtggggagtttggctggggcggcacatctgttaaacgataacgcagatgtcctaagggggactcatggagaacagaaatctccagtagaacaaaagggtaaaagtccccttgattttgattttcagtgtgaatacaaaccatgaaagtgtggcctatcgatcctttagtccctcggaatttgaggctagaggtgccagaaaagttaccacagggataactggcttgtggcagtcaagcgctcatagcgacattgctttttgattcttcgatgtcggctcttcctatcataccgaagcagaattcggtaagcgttggattgttcacccactaatagggaacgtgagctgggtttagaccgtcgtgagacaggttagttttaccctactgatgaatgttgtcgcaatagtaattgaacttagtacgagaggaaccgttcattcagataattggtttttgcggctgtctgagcagacactgccgcgaagctaccatctgctggataatggctgaacgcctctaagtcagaatccatgctagaacgcgacgattacttgccctcgcacatttgagaaggataagaataaggcacttgtgtcgcagaaccgtagtaggtcggcagcggtgcgcgtggcggaaaggctgcgtgtgcttgccggcggatggcaatgtcaggatgcgcgaggataaatcctttgcatacgacttagatgtacaacggggtattgtaagcagtagagtagccttgttgttacgatctgctgagattaagcctctgttgtccgatttgttgcttcggcggcgaagttgcagtttgcagatgcgagctgggtatttcggcgagatttggggatgccggcgtggccgggtggtgggcgatgctgttgggtgccattaattcctagtccgtggcttggtgtatggtatacgtgaggacgggggtggtggatttgggtcgatcgtctgggtaggcatattttacctgttttggacttaggattttttcaaataatgtcagacgggatttatgcttacgtaagggaggagagtggtagggtagggattattgattacataaggagaatagctatgatgtcagaggagattaagacttatgattacgtagtgtagtgattacataagacgtacagtggcccgcggagattaagacttatgattacgtagtgtagtgattacttaagatgtacagtggagattagtatagacctgtagacttgtgcttagttaattaagacttgattactgaattagttatgaagtggtgagcgcaataacacgtgagatgactccagtgattcaatcacgtgaataagtagaagtcaagacacagagtcatattaaagaaccaaagagaagaagagtcagagggagttgactctggagaaagaatcacgtgcggacagaggggtttggggaaaaaagggctgggaacgtcccaaagaggcaagtgacgcacagaaattagggaaatatggtggtgaaaaattttcactgcacggctgtagcacgaaaattagtatgtagagacgcaacgacccgaaaaaagagctaaaaagtaaaaaacgcactttttggaaattattaagaaagtaatttattttacacctagaggtcaaaatatgggatttttgactaactttgaacgcttatatctggacaaccagagcaggtatgcactagtgtagggtatgggtgtgaagcctgaatttttgtgcgcatgtaggtatatgtagtgtgtagaatgactgcgggagtaagaagatagtaaacagaaggtgataacggacataaccaaaagacaacgaaagtggtgtcgtggcggcttggcgtggcggctcagcacactgatagcggctcagcagcgtacgataagaaaaaagtcgaggggctcgtgagaaaaaacaattttttcgactcgacgaaaagtggaaaaatgtggcggtggcgggtggcggtgcaggcagtagtggcgcatgcggtgcctgtggcgcagcggaaaattgggttcggaaaattggcgcgcgtggtgaaaagtgacgagcctccgcaaaattgggttcggaaatttgagaaatttttgaaagtgacgagcctccggaattttgggttcggaaatttggcgagaaattctgaaaaagatgagcctccgtaaaaaagtgacgagcctccgcaaaattgggttcggaaaattggcgagaaattctgaaaaagatgagcctccgtaaaaaagtgacgagcctccacgagagaaatgcgccgcaaaaaataatacgcaatacgccacaggaaaatacactactatgaaaaatactatgaaaaaaaaagattgcagcacctgagtttcgcatatggtctcccactacactactcggtcaggctcttagcagcttaactacagttgatcggacgggaaacggtgctttctgctagatatggccgcaaccgacagtgttcgatttcgggcggtattatggatgtcaaaatgaaaaaggccttttttctcgggctacagacgtgctgaggacacgagacccagtgcgttggaatcggattgttcaggagtatctgtgtaaattttatggaggcaaaagaaggggtgaaaatatgattttttatttttcatgggaggtaagtgaagaatttcattgggaatatgtgtgttgatggatgtactagttggaagaagtattttttatgttgttttttttgactttttagagttggatgggcaacagagagcgtagaatatagtggtaaagatttaacatgggcatattttagcgtattggaggagttagaagggtaaagtgtgatatgggtacaacagggagggtgtaataaaaaaaaagtatgttctttttgatgatattatatgcttgatgtggagatccagtggtgtttattatgaaataaaattatcaaagcgaaagacgcactggttgtggagaaataaataggtgaagttagtagagtgccaagttcaacagtgaatatctcgacaaccacgccagctagagacatgccttgtagatagttttgatcagcgtgttttactctctaggagcagtgtttaacatgggcataatggaaattggccaaaaccaaagttcatctggagagaagtggtttcatgggcaagttgactgggagtgcccagtggagctgtgcccagtgaagaggcccttcgtgggcaagcagacaaattgtgtgagtacttggctggaaattttggcaaagtgagaaaaatgcacagcgagggtgttcactggggagttgcccagtagacattttttcatgggcagctgccgggtagaaacccaatatgagaaatttcaaaatcactaagtcaggattctgagagtggtaggaggtacaagaggccagggagagtagagaacagagattggaattggaaaatccggcctgagaggggagttacggggggtgttggtattgttgcccagtgaagtgggaatttcgtgggaagtagactgtgagagttttgaattttttttaaattttgagattcgctgggaagattgaaagtttttgtcgggcaagtattacattccatgggcagtgcccagtgaaggaaaacacacatcaaaatttcctagtttctgtcctattgcttagttacaaagatatgttgatcaggatgctctgtatagtgtgccatgtaattatgaaggtgtaggaaggcatattgggcaagtttgcaaaatgggatttgttagaaatgcatgcacggctgacggctcagcagcattgacaaaaagaaaaacttcacctcgcgctcgaaaacattgcacgccaaaacgaagtccaatttaactcctggacgccgcggccaacgcgcgctgcgaatttttggcaagattacgcagtccgggggatatacatgagaaaagcacttaaaaaatgcggttcttagcggtgttgtgcaccgataggccaagatcccacggagagtatgcaggggcgtctacggacaagcttgggtatggccggggacaagagacgcaagtcttggacaggggcattgtggtcttgcgaccgtggtgcgcactgacggggccggtgggttgctagctgatagccagcggaccactaggtttattggggacggggttggagatgtagccgtgcaaacgtgacatctgggaccactctccactgaagcggacgaagctgtactttgtacaggggacctccgttgaagaaagtcaaacagtgctatgtgtaggttaatccaatcatcataacaaaactcatctgagcgtagttatctggttgatcctgccagtagtcatatgcttgtctcaaagattaagccatgcatgtctaagtataagcattatacggtgaaactgcgaatggctcattaaatcagttatcgtttatttgatagttccgttctacatggataaccgtggaaaatctagagctaatacatgcgtaaagccccgacttcgggaggggtgtatttattagataaaaaatcaatgccctcgggccttttgatgattcataataacttttcgaagctcatggcctttgtgctggagctggttcattcaaatttctgccctatcaactttcgatggtaggatagaggcctaccatggttttcacgggtaacggggaataagggttcgattccggagagggagcctgagaaacggctaccacatccaaggaaggcagcaggcgcgcaaattacccaatcctgacacagggaggtagtgacaatatataacgatacagggccattggtcttgtaattggaatgagtacaatgtaaataccttaacgaggaacaattggagggcaagtctggtgccagcagccgcggtaattccagctccaatagcgtatattaaagttgttgcagttaaaaagctcgtagttgaactttgggcctgggcgggcggtctacctatggtaagtactgttgcggccgggtcttttccttctggctaactcttcggagtgaaccaggacgattactttgaggaaattagagtgttcaaagcaggcctttgctcggatatattagcatggaataatagaataggacgttatggttctattttgttggtttctaggaccatcgtaatgattaatagggacggtcgggggcatcagtattcagttgtcagaggtgaaattcttggattaactgaagactaactactgcgaaagcatttgccaaggacgttttcattaatcaagaacgaaagttaggggatcgaagatgatcagataccgtcgtagtcttaaccataaactatgccgactagggatcgggtggcgcttcttgcccactcggcaccttacgagaaatcaaagtctttgggttctggggggagtatggttgcaaggctgaaacttaaaggaattgacggaagggcaccaccaggagtggagcctgcggcttaatttgactcaacacggggaaactcaccaggtccagacgtaataaggattgacaagctagagacttctcttgatcttacgggtggtggtgcatggccgtttttagtccttggagtgatttgtctgcttaattgcgataacggacgagaccttaacctgctaaatagggctgcgagcatctgctcgtgggctcttcttagagggactatgggtttcaaacccatggaagtttgaggcaacaacaggtctgtgatgcccttagacgttctgggccgcacgcgcgctacactgacggagccagcaagtatatccttggtcgagaggcccgggtaatctcgtgaaactccgtcgtgctggggatagagcattgtaatttttgctcttcaacgaggaattcctagtaagcgcaagtcatcagcttgcgttgattacgtccctgccctttgtacacaccgcccgtcgctactaccgattgaatggcttagtgaggctccaagattggcgccgcgggaggggcaactttcccatggcgctgaaaattcagtcaaacttggtcatttagaggtcgtaaaagtcgtaacaaggtttccgtaggtgaacctgcggaaggatcattactgtgatttatatcttatacacatgcgtgagcgcaccaaacacctaaaattgtaataataccagtcactaagttttaacaaaacaaaactttcaacaacggatctcttggttctcgcatcgatgaagagcgcagcgaaatgcgatacctagtgtgaattgcagccatcgtgaatcatcgagttcttgaacgcacattgcgccccatggtattccatggggcatgcctgtctgagcgtcgtttccttcttgcgcaagcagagttgagaacaggctatgcctttttcgaaatggaacgtcgtggacgaagtgaactaaattattggaacgctttggccgccgaacttttaactaagctcgacctcagatcaggtaggaatacccgctgaacttaagcatatcaataagcggaggaaaagaaaccaacagggattgcctcagtagcggcgagtgaagcggcaagagctcagatttgaaatctcacctagtgtgcgagttgtaaattgcaggttggagtctcgggttagacgtgtgtgcaagtcccttggaacagggtgccactgagggtgagagccccgtatcgtgcatgtcgacacctgtgaggcccttctgacgagtcgagttgtttgggaatgcagctctaagtgggtggtaaattccatctaaggctaaatattggcgagagaccgatagcgaacaagtactgtgaaggaaagatgaaaagcactttgaaaagagagtgaaacagcacgtgaaattgttgaaagggaagggtattgggctcgacatgggatttacgcatcgttgcctctcgtgggcggcgctctgggtttttcctgggccagcatcggttttcgttgcaggataaggacaattggaatgtggctcctcggagtgttatagccttttgtagatgctgcgtatggggaccgagggctgcggcggactcgtttcgtctcggatgctggcacaacggcgcaataccgcccgtcttgaaacatggaccaaggagtctaacgtctatgcgagtgtttgggtgtaaaacccgtacgcgtaatgaaagtgaacgtaggtcggaccgctctctcgggggcgggcacgatcgaccgatcctgatgtttatcggatggatttgagtaagagcatagctgttgggacccgaaagatggtgaactatgcctgaatagggtgaagccagaggaaactctggtggaggctcgtagcggttctgacgtgcaaatcgatcgtcgaatttgggtataggggcgaaagactaatcgaaccatctagtagctggttcctgccgaagtttccctcaggatagcagaagctcgtatcagttttatgaggtaaagcgaatgattagacgtctcggggtcgaaatgaccttagcgtattctcaaactttaaatatgtaagaagtccctgttgctttattgaacgcggacgtttgaatgcagagcttttagtgggccatttttggtaagcagaactggcgatgcgggatgaaccgaacgcaaagttaaggtgccggaatgcacgctcatcagacaccacaaaaggtgttagttcatccagacagccggacggtggccatggaagtcggaatccgctaaggagtgtgtaacaactcaccggccgaatgaactagccctgaaaatggatggcgctcaagcgtgttacctatactttgccgccatggcgtgatgccttggcgagtaggcaggcgtgggggtttgtgacgaagccttgggcgtgagcctgggtcgaacggcccctagtgcagatcttggtggtagtagcaaatattcaaatgagaactttgaagactgaagtggggaaaggttccgcgtcaacagcagttggacgcgggttagtcgatcctaagagatggggaagctccgtttcaacgtgtgcaattctttgcaccaccatcgaaagggaatccggttaaaattccggaacttggatgtggattcttcacggcaacgtaacagaatgcggagacgccggcgggagccctgggaggagttttcttttcttcttaacagcttatcaccctggaattggtttatccggagagggggtcttatggctggaagagcgtcgcctttgtttgcgacgtccggtgcgcttgcgacggtccttgaaaatccgcaggaaggaatagttttcacgccaagtcgtactcataaccgcagcaggtctccaaggttaacagcctctagttgatagaataatgtagataagggaagtcggcaaaatagatccgtaacttcgggataaggattggctctaagggttgggtggatgtgcttcctgtgctggccatgcgtgctggcgctgcttcttcgggggcggtgctgctagctacgcttgcgcttgcggcctccacggttaacaaccaacttagaactggtacggacaaggggaatctgactgtctaattaaaacatagcattgcgatggtcagaaagtgatgttgacgcaatgtgatttctgcccagtgctctgaatgtcaaagtgaagaaattcaaccaagcgcgggtaaacggcgggagtaactatgactctcttaaggtagccaaatgcctcgtcatctaattagtgacgcgcatgaatggattaacgagattcccactgtccctatctactatctagcgaaaccacagccaagggaacgggcttggcagaatcagcggggaaagaagaccctgttgagcttgactctagtttgacattgtgaaaagacatagagggtgtagcataagtgggagctccggcgccagtgaaataccactacctttatcgtttttttacttattcaatgaagcggagctggtcttgacgaccacgttctagtgcgaaggcatcttgtgtgccgatccgggttgatgacattgtcaggtggggagtttggctggggcggcacatctgttaaacgataacgcagatgtcctaagggggactcatggagaacagaaatctccagtagaacaaaagggtaaaagtccccttgattttgattttcagtgtgaatacaaaccatgaaagtgtggcctatcgatcctttagtccctcggaatttgaggctagaggtgccagaaaagttaccacagggataactggcttgtggcagtcaagcgctcatagcgacattgctttttgattcttcgatgtcggctcttcctatcataccgaagcagaattcggtaagcgttggattgttcacccactaatagggaacgtgagctgggtttagaccgtcgtgagacaggttagttttaccctactgatgaatgttgtcgcaatagtaattgaacttagtacgagaggaaccgttcattcagataattggtttttgcggctgtctgagcagacactgccgcgaagctaccatctgctggataatggctgaacgcctctaagtcagaatccatgctagaacgcgacgattacttgccctcgcacatttgagaaggataagaataaggcacttgtgtcgcagaaccgtagtaggtcggcagcggtgcgcgtggcggaaaggctgcgtgtgcttgccggcggatggcaatgtcaggatgcgcgaggataaatcctttgcatacgacttagatgtacaacggggtattgtaagcagtagagtagccttgttgttacgatctgctgagattaagcctctgttgtccgatttgttgcttcggcggcgaagttgcagtttgcagatgcgagctgggtatttcggcgagatttggggatgccggcgtggccgggtggtgggcgatgctgttgggtgccattaattcctagtccgtggcttggtgtatggtatacgtgaggacgggggtggtggatttgggtcgatcgtctgggtaggcatattttacctgttttggacttaggattttttcaaataatgtcagacgggatttatgcttacgtaagggaggagagtggtagggtagggattattgattacataaggagaatagctatgatgtcagaggagattaagacttatgattacgtagtgtagtgattacataagacgtacagtggcccgcggagattaagacttatgattacgtagtgtagtgattacttaagatgtacagtggagattagtatagacctgtagacttgtgcttagttaattaagacttgattactgaattagttatgaagtggtgagcgcaataacacgtgagatgactccagtgattcaatcacgtgaataagtagaagtcaagacacagagtcatattaaagaaccaaagagaagaagagtcagagggagttgactctggagaaagaatcacgtgcggacagaggggtttggggaaaaaagggctgggaacgtcccaaagaggcaagtgacgcacagaaattagggaaatatggtggtgaaaaattttcactgcacggctgtagcacgaaaattagtatgtagagacgcaacgacccgaaaaaagagctaaaaagtaaaaaacgcactttttggaaattattaagaaagtaatttattttacacctagaggtcaaaatatgggatttttgactaactttgaacgcttatatctggacaaccagagcaggtatgcactagtgtagggtatgggtgtgaagcctgaatttttgtgcgcatgtaggtatatgtagtgtgtagaatgactgcgggagtaagaagatagtaaacagaaggtgataacggacataaccaaaagacaacgaaagtggtgtcgtggcggcttggcgtggcggctcagcacactgatagcggctcagcagcgtacgataagaaaaaagtcgaggggctcgtgagaaaaaacaattttttcgactcgacgaaaagtggaaaaatgtggcggtggcgggtggcggtgcaggcagtagtggcgcatgcggtgcctgtggcgcagcggaaaattgggttcggaaaattggcgcgcgtggtgaaaagtgacgagcctccgcaaaattgggttcggaaatttgagaaatttttgaaagtgacgagcctccggaattttgggttcggaaatttggcgagaaattctgaaaaagatgagcctccgtaaaaaagtgacgagcctccgcaaaattgggttcggaaaattggcgagaaattctgaaaaagatgagcctccgtaaaaaagtgacgagcctccacgagagaaatgcgccgcaaaaaataatacgcaatacgccacaggaaaatacactactatgaaaaatactatgaaaaaaaaagattgcagcacctgagtttcgcatatggtctcccactacactactcggtcaggctcttagcagcttaactacagttgatcggacgggaaacggtgctttctgctagatatggccgcaaccgacagtgttcgatttcgggcggtattatggatgtcaaaatgaaaaaggccttttttctcgggctacagacgtgctgaggacacgagacccagtgcgttggaatcggattgttcaggagtatctgtgtaaattttatggaggcaaaagaaggggtgaaaatatgattttttatttttcatgggaggtaagtgaagaatttcattgggaatatgtgtgttgatggatgtactagttggaagaagtattttttatgttgttttttttgactttttagagttggatgggcaacagagagcgtagaatatagtggtaaagatttaacatgggcatattttagcgtattggaggagttagaagggtaaagtgtgatatgggtacaacagggagggtgtaataaaaaacaaagtatgttctttttgatgatattatatgcttgatgtggagatccagtggtgtttattatgaaataaaattatcaaagcgaaagacgcactggttgtggagaaataaataggtgaagttagtagagtgccaagttcaacagtgaatatctcgacaaccacgccagctagagacatgccttgtagatagttttgatcagcgtgttttactctctaggagcagtgtttaacatgggcataatggaaattggccaaaaccaaagttcatctggagagaagtggtttcatgggcaagttgactgggagtgcccagtggagctgtgcccagtgaagaggcccttcgtgggcaagcagacaaattgtgtgagtacttggctggaaattttggcaaagtgagaaaaatgcacagcgagggtgttcactggggagttgcccagtagacattttttcatgggcagctgccgggtagaaacccaatatgagaaatttcaaaatcactaagtcaggattctgagagtggtaggaggtacaagaggccagggagagtagagaacagagattggaattggaaaatccggcctgagaggggagttacggggggtgttggtattgttgcccagtgaagtgggaatttcgtgggaagtagactgtgagagttttgaattttttttaaattttgagattcgctgggaagattgaaagtttttgtcgggcaagtattacattccatgggcagtgcccagtgaaggaaaacacacatcaaaatttcctagtttctgtcctattgcttagttacaaagatatgttgatcaggatgctctgtatagtgtgccatgtaattatgaaggtgtaggaaggcatattgggcaagtttgcaaaatgggatttgttagaaatgcatgcacggctgacggctcagcagcattgacaaaaagaaaaacttcacctcgcgctcgaaaacattgcacgccaaaacgaagtccaatttaactcctggacgccgcggccaacgcgcgctgcgaatttttggcaagattacgcagtccgggggatatacatgagaaaagcacttaaaaaatgcggttcttagcggtgttgtgcaccgataggccaagatcccacggagagtatgcaggggcgtctacggacaagcttgggtatggccggggacaagagacgcaagtcttggacaggggcattgtggtcttgcgaccgtggtgcgcactgacggggccggtgggttgctagctgatagccagcggaccactaggtttattggggacggggttggagatgtagccgtgcaaacgtgacatctgggaccactctccactgaagcggacgaagctgtactttgtacaggggacctccgttgaagaaagtcaaacagtgctatgtgtaggttaatccaatcatcataacaaaactcatctgagcgtagttatctggttgatcctgccagtagtcatatgcttgtctcaaagattaagccatgcatgtctaagtataagcattatacggtgaaactgcgaatggctcattaaatcagttatcgtttatttgatagttccgttctacatggataaccgtggaaaatctagagctaatacatgcgtaaagccccgacttcgggaggggtgtatttattagataaaaaatcaatgccctcgggccttttgatgattcataataacttttcgaagctcatggcctttgtgctggagctggttcattcaaatttctgccctatcaactttcgatggtaggatagaggcctaccatggttttcacgggtaacggggaataagggttcgattccggagagggagcctgagaaacggctaccacatccaaggaaggcagcaggcgcgcaaattacccaatcctgacacagggaggtagtgacaatatataacgatacagggccattggtcttgtaattggaatgagtacaatgtaaataccttaacgaggaacaattggagggcaagtctggtgccagcagccgcggtaattccagctccaatagcgtatattaaagttgttgcagttaaaaagctcgtagttgaactttgggcctgggcgggcggtctacctatggtaagtactgttgcggccgggtcttttccttctggctaactcttcggagtgaaccaggacgattactttgaggaaattagagtgttcaaagcaggcctttgctcggatatattagcatggaataatagaataggacgttatggttctattttgttggtttctaggaccatcgtaatgattaatagggacggtcgggggcatcagtattcagttgtcagaggtgaaattcttggattaactgaagactaactactgcgaaagcatttgccaaggacgttttcattaatcaagaacgaaagttaggggatcgaagatgatcagataccgtcgtagtcttaaccataaactatgccgactagggatcgggtggcgcttcttgcccactcggcaccttacgagaaatcaaagtctttgggttctggggggagtatggttgcaaggctgaaacttaaaggaattgacggaagggcaccaccaggagtggagcctgcggcttaatttgactcaacacggggaaactcaccaggtccagacgtaataaggattgacaagctagagacttctcttgatcttacgggtggtggtgcatggccgtttttagtccttggagtgatttgtctgcttaattgcgataacggacgagaccttaacctgctaaatagggctgcgagcatctgctcgtgggctcttcttagagggactatgggtttcaaacccatggaagtttgaggcaacaacaggtctgtgatgcccttagacgttctgggccgcacgcgcgctacactgacggagccagcaagtatatccttggtcgagaggcccgggtaatctcgtgaaactccgtcgtgctggggatagagcattgtaatttttgctcttcaacgaggaattcctagtaagcgcaagtcatcagcttgcgttgattacgtccctgccctttgtacacaccgcccgtcgctactaccgattgaatggcttagtgaggctccaagattggcgccgcgggaggggcaactttcccatggcgctgaaaattcagtcaaacttggtcatttagaggtcgtaaaagtcgtaacaaggtttccgtaggtgaacctgcggaaggatcattactgtgatttat

SEQ ID NO: 24 - DNA, 29489 bp, Pichia kluyveri
  >NCYC246_000010F P_kluyveri_NCYC246_TS
attaaagtatctgaaactgtttttcttgcacaacatgaagataataataaacaattgattgaatctattgtttcatcaatagtaaaggaaaatatgtcatcatattatcattatttgtattatgatattcatttaaagggacttgaatgggatcaaagtatttatgattcacttttaagtgaaagtgaaaaaaatattaagaaaattaaggaagaaattgaaaacttgaaaaagaggatgaatcagagatggatttattaaagaaatggacagaattaggtgaatattatgccaaaattggtgataaaataaatgcagaggaaacattattgaaaacgattgaattagcaccaagtacggggtccaaaattgatttatatttattaatttcaagaattggatttttctataatgatttagaatttactaaaaaatatttagataaatcaaatgaatttattgaaaagggaggtgattgggagagaaagaatagatataagacatataatggaatttatttaatgtcaattagaaattttgaagaagcatgtaaattattaaatgaatcattaacaacatttacatcaactgaattaacaacatatgaaaaaattgcacaatattcattaatttgtggatcaattatatttgagagaccagatttaaaaaataaattgattgaaagtcctgaaattttatcaattaattcaacaaatgaagaattaaaaccaatttttgaattagttaaaagtatttatttaactgaatataataaatttttccctgcattattggaaactaatgatttaattttgaaaaaggataaatatttatttgaacattgtaattattatatgagagaaattcgttgtcgtgcatattctcaattacttgaaagttatcgttcattatcattaaattcaatgtcaaaatcatttggtgtaagtgttgaatttttagataatgatttaagtaaatttattgttaataagaaattaaattgtgttattgataaagttgaaggtattgttgaaactaataaaaatgataataagaatttacaatataatacattaattaaagcaggtgatgcattattaacaaaattacaaaaatatggtgcagctgttcgtatgagtggagctgaaaaggtatagattagtatatattatatattatattattataaataaatattatataaatattatagaaacttatacttaaacttaaagtgatggagcagaattaagtatctcttcaattctctcatcttcaacaagtgaactatcagaatatttaccatcatattccatttcattagattctgcaggtatcacttgacctttatgtttatcatctaatttaacattaagtatttccttctttgcatcttctgtcttaacaataactttatcaccttgagtcagatcatccatcatctctaatttatcagattcattatcagttgtagtatatagagatttcatatgttttagtaattttttctgttgtataactggtgtcataccaacagttgcagcaattccaagtactacacatataaaaacaatgaacttctttgcactactagataccattattgtctgttgtagaagaaagaagtgatcagttcatgtagtaaattaactcaccgcattgattcttatctcattaattttttctataatgttgataagttattattgtattgtacacgatttacagatagatatatagatatttacagaaatattatattgggaggatgggttgccagatgtgtatggagttatcattactacatgaggcaagtgttggaacatccatatcaggagcccaagtaacatcattaacaggtagtaaatgacctccatgaacaaatataggtgtaagatcttcagtattccataatacaactgttgaatcaactgatgatgaaacaagaaggttactcttattaggtgaatatttagtagcagttatggaatctttatgttgagttgaatttataattggaattgaatcatttcttacatcaaatatattaactaaaccatttgaactacccgaaactaattgtaatgtattaaatggattaatatcaactgtatttaaaggttccttactaataaattctttaacacgttgagatgatgaaggatttcgtatgtcccaaatagtacatttaccatcttcaccaacagatgcaattaatgaattatgatcaggtatccatttaatttcattaacaccataattatgtgcaggtatatttaaaattggttcagttaatgtacaagtttgatttgttgttaaagttgaaaatttcttctttggaggtggataaaattgagattgtaaatcccaaattgcaattataccatcatttgcagctgttgcaattgtaaatttattaggattccaatctaatgtccaagattctgatgtatgatatttaagtaatatatcacaagtttcaatagtagttgtgtcattattattatcactaatattattattatcattattattatcactattattattattatcattatcattagttaaatcttttatattaaaattatttggtttacgagttctatcaaatatacgaactaaacctgaatctgaagaagttgcaagtaaatctgaatgtaatggacaatgtttaattctattaatatcaccattatgaggtatacgttgttgtaaaccaattgaattagtaacagttttaatttcaggttcatcaattaatacatcagtatcaattttatgtaattcctttgtattctttaaatgaggtaatggaagtgaataattaaattcttctttatcaattgaataatcaaaattttgtaaatttgatgaattatttgaatttaaatcaattatattagcattaactaaaagtaaagattcaattgaattaacattgttggagaatgttgaaatagctaatttctcaacatgtgatatgttatttgcagtagttgtagtgttattattgttaataacatccttatttgaggagtagtcattccttgacgcggttttaccagtgtttggtaaccaatctatagctaaggatggccatagaagggaagatgtctgtatctgataatagttatagggggtattcttcttccaagtgggatagtccataattataattatcgtaagatctatatatatattcctatatacaaaacctgtcctggtataaagtaaagacccatgtaaagatcatatatagagaagaccaataaagaacgtgttttgccctctccctaaaaattttgaaatttggacacagcgtttgtttatagttggctcatcccactatttgttgtctttttaactgcttttacttcttttcatttcatttcatttcattccaattgtacaaccatgtctaaacacgctaaatcacaatctacatttgcttttgaaaatgctagttctaatgttgcagcttctcaaatgagaaatgcattgaattctttagttgattcatcaaattcatctcaagatatttcagatgaaactaaattaagattcgaaaatgaaatggattcattctttgcccttttcagaagatatcttaatgataaagcttcatcttctaaaacaatcgattgggatttaatttcttcaccttctcaaaatgaagttgtcccttattcaactttaaatgatgattcatcaaataaaaatttcgataaattagcagtacttaaattaaatggtggtttaggtacttcaatgggttgtgttggtccaaaatctgttattgaagttagagaaggtcaatcattccttgatttatctgttagacaaattgaattcttaaataaaacttttgatactgatgtccctcttttattaatgaattcatttaatactgataaagatactgaattaattgttaaaaaatatcaatctcatagaattagaattaaaacttttaatcaatcaagatatccaagaatttttaaagataatttattaccagttccaaaaagtattgatgataaattagatgcttggtatccacctggtcatggtgatttatttgaaagtttagtatcatctggtgtattagattctttattacaagaaggtaaagaaattttatttgtttcaaatggtgataatttaggtgcaactgttgattctaaaatcttaaatcatatgattgaaactggttctgaatatataatggaattaactgataaaactagagctgatgttaaaggtggtacattaattaattataatggtgaaattagattattagaaattgctcaagttccaaaagatcatgttgaagaatttaaatcaattaaaaaatttactaattttaatacaaataatttatggattaatttaagagcaattaaaagattagttgaatcaaattctttacaattagaaattattccaaatcaaaaatcaattactgttggtaattcagatatgtcagttatacaattagaaactgctgtaggtgcagcaattagatattttgataatgctcatggtgtcgttgttccaagatcaagatttttaccagttaagacttgttctgatttattattagttaaatcagatttatttaatttacaacatggtacattagttatgaataatttaagatttggtggtgctccattaattaaattaggttcagattttaagaaagtttcaaatttccaaaaaagaattcctcatatgccaaaaattattgaattagatcatttaactgttactggtaatgttttctttggtaaaggtattcaactaaagggtacagttattatagtttgttctgatggtcaaaaaatagatattccaaatggttcaattcttgaaaatgttgttattactggtaaccttcaaattttagagcattgattaattattcaattattcaattattctccttttgcattgatttaatataacttcttgtttaaatgtttagatagtgtttaaaacaatttttatatttcatattttatattttatactttatattttaaaacttaaattatattattaatattattataaaaacgtaatataaaatgaaaaactaccttccaaattccaatgcacgcatttcctttccaagctttctcttacgtttacgttcgatagatttattcttttgtctgctatccatactctcaaatctatcaacaagtaaaactttcctcttctctgctctagttaagaatttcataccaccattttcttccttttgtttctttaaataagttcttaatgcttccttttctctatcctttttctttaatgaatctaatttagatcttgtactttgtaatttatattttaaatcttcaatttcattatctgtcatacgacttaataatttcttatttttaagaattttctccatttctaaaatttctttctccctatattcatctaaaaatgcatattgtttcctaacaacttcataatcaacagatttacctaatgctgtatcaaatctaacatctctattaccaaataatcctccaattgatccatctcctgtataatctttcttaatttcaagtcctggaatatctcgtacaacacttacaggtcgtttactaatttttgtctcctttggtgcatgtttattgttcttcttcttaatcggttgattagttggtcttttaactgattcttcatcttcactgaaaaaatcatcttcctcggattctgatcctgattcagcttcggaatcaatttgattatcaataaatcctccattggtttcctcaggtcctgaatctgaatctgaattggaattcgatctaggtctaggtttactcctatcttcatttctgttcgaaaatccgcctctacctctaaatccacctctacctctaccttcaaaactacctcctctacctctaaatccacctcttcctcttcctcctctactgccagctctacctccaaaatctttatctctcatgtttccacgactattgcctctgaatccaaccattgtcctgtgtagaaagagggaacttaaacaattaaaaattgaaagataaaatttcatgaaaaatattttttttcagacctattttcatggtcggctcaacaaccttggtttacattttttcaattttaaattcagttttgtaaaaggtatacaaattctttaaaaaaacaatgcctattctaactatatactatatcaaattatttctctttatcccttgataaaagtaaaccttttcccaaataatcacactaattatattacgaatcacatattaagtgaataatacttatataaaccacgtacacttaaatcattaccaaaatctttatcctgtacagcataaccaacatcatcacaacaattaattttaacacatgcataacctaataaatttaaccttttaattctatttaaaactaattgacctgtattaatatcccattcaactaatcttgcacctgaagtttcagtttcataattatcataaaatttattatcattattatttaaaattctatgaacccaacttcttcttgaaatacctttattattgaaaactctccaatattcttcgttttgatcattttgatctattatataattattattaaaatttaaattatcatatatttttaatttgaaaacatgtgctaaattatcagttaatgaaggtttaacttcgaaaatttctatatttcttaattcaattataatatttttcaattttgcaacagttcttgtacttgatgaaatatctaaaaattttaatttatttaagcaatttaaactacttaaaatttgtaaatcttcaaaatttgaaaaatctaaattaacatcacaaatacttaaactctctaattctgtaaaattttcacttatctttttgatatgatcaccattaatatttgcaaatccatttaaatttaaatatcttaaatttggtgcaccatcagctaaaatttgtagaattgtatcaattctttcagtacttaaagtttcacttgagaaacattgttgtaaatttaaccatcgtaaacttgacacttcatttgaagttttaataggtttattattgttattgatattttcttcctcttcatcttcattttcgattttaacaccacatacagctggatgttgtaaaaattttaaaaattcttgaaatgtacctaaatgagaacatttacgtaaagataaatgagttaatcttgtattttgatttaaaaattgatttaaagttttcaaagtaacttgagtatgagctaaatctaattttttcaaatttggtgtaaattttaaaattttatcataaacagttgaaggaaaatcaagacattcatgaaatgataaattttcaatttttagattatcatttatagttaataaatcaaaataatcagttaaattatcatttgaaaaaccacaaaaatctaaagattttaaattttttaaattattgaaaatatattgtaaaatttcataacttatatcagtatcaacactttcacttaataataaagttttcaaatttttattacataattcaagacattttaataatgttacatctgttaaatttgggattttataaattgattcaattgatttacctaaaccaacagcagtaaattcttggaaatctaaatattcaacataatcacctaattcattggtatttattaaatttattaagaatttactaaatgcaaaagatctaataaatttacaatatttgtattgatattgacgacaaagatataggaaacctgaattaactaacattaaattatctagatttgagaatctaccaagagttaaatttttagcagtacttgaaattttagttttctcaatttcattagtattagtattagtagtattattattattattataagtaccactaatattctcatttttagaaactgaagtttcattacatatggaaagctcatttataacatgaggagcatccatataataagcataagaaatgattttttcagttatttcaattgaaaatgggaataatttactaagtttattaacatcatctgtatttctaataagtatatctaaatttaacaaacttgcagttttagaaatatttggaattgaggatgagccttgatttgataattgttgattaatattgatattactattatttccagtagattcgatattacctaatgatgatattggtaaagttgtagccattcaaaaaaaagcgggtagttaagagaaagtagaagaaataaaaaaactaagacataaagataaaggaaaagaaaaggattaatattaaaataaagatcagcaattagaaatgtcacttttgttttcaacggtgaagaaaaagaaaagaaatttcaattttccgcactatgaaaagatttaatttttatctccgctttattggaagatttactgttattattaaggggcattggatgtgtatgttaatattgtatattgtattgttttgtattgttattatgtaggggggtatggaagaaggttaaccattggtttttatgtagtttttgtaaaaaaatcttataaaattggaaaataaaaatattttttgagataatatttttaatattttaatgttgaccaatggcctttaaaaattaggcaaaataatcattgctttaaatcattaaatagttgaaaacaaacatttcttttttactcactacaaatcaatatggctgcttacgtcagcagaaatacaattacagaaagacaacaaaaatttatttttgcgttgtaagggaataaatacaagttgttcaataatatccacgtgaagattaggtaagctgattacgtaaagatgataagatggaaataggaattccgagatacggaggttcggagatgtcggagtaagaaaggaatgacttagattgaaattgaattaattatgataaggagtggtatgattgataaggaatagtttaattaactatattaaggaatggttaatattgtaatataaataagtatgatatcctgtataactttgtataactctcttctgagaggggacattaatcagagtattagttagagaacaatctactaattaataccaaccgtctcattgctactcgctgtctattacacaaataaaaggtccaacgagtaaacttattttatacttattacttccattacgtaattaagtattatccactatcttacatattttagtttacatttggtagcaccggctagtgtttgtgttcctaattaaatcaaattatattcatctattaattaaattaaatcaactaaaaatgtcatctgctaaagataagattaatgctttaaagcaacaaattaaggaaataaaattaactgaaaagaagaagaagaaagaattatcaaagaaacattctaccaaacattcaaagaacgttattaaaaagaagaaacatattaaaccacctcttagaattatccattccgatcctgaaatgtctgattattcatttgatgatgctttttcctcagataattcccattctgataactccaattctgattctgatatttctgattccgatactgatactgatgatgataataaaacttctaaaaatgataaacttagttctaactttccaaaatttgatggttcttctactgatgataaaggcaaggaattctccactactgaagctcaacttaaagcaaaaacttggttatctaagttgcacgttaatttaattgataaaggtatttcaaaatcaagctgggctagaaaagctattgttaatctcgaaggtagagcatacaaatgggtagaacataaattagagaagaatccaaagtatttaaagatttcctgggaaagatttttacgtgatttcaaaaaagaattttgtcctgttattgaagatgatatgcatgctatggattacaagattctaacttttaaaatggttccaggaatgaaagtctctacatattctgatcaatttaaagaatatattcaagaattggattttgaagaatctactaaatttcaaatttcaagatatttacttggtttaacacctgaattgaaaaagatggtatcccaacaaaaacctcgtaccttgaatgctgctattcattatgcagaagattctgaagctattttgaatgatattgaagaagcaaaaccaaaaaatccttggatcaataatatcgaacatcaaactcctgttagacgctcttattctcgcccatatagagttaataaatataaacctggttatcataataagcaaagatttttcagaaacaaaagaccatttaaaaggtacaattcaaattttaccccaatcggtggtaatcgttccatgcatttttctcgtcctactaaactaaataataaactatctaataataataatactagttctttttcttatattgcacctccagtaagtattcaacccgaagttgatcatttaaatgtcgagaaggaagaaggtgatactgttgttaataattctcaaagggtgattccaagagatgagactattaagaagggtgattcctctgaagttaaattgttaaagggtgattccaaacaagaaacaaatagtccaactttaaacattccttcattacctgaaattttacatgttaatgctttgaatattgaaaatttacgaaaaatagatgtacaaattgataataaaaattccgcatcagcaattattgatactggatccaatacagatgctattactacaattttatgtgatgaactgttattatcaagcaagattagattatatgttgaaccaattagtgctattttagttaatgatactgttgatgctattggtgaactagatatagatattgatgttgatctatttaataatcctatcaaagaaaaaagaacatttttagttttgcaggcaaacaccaagaaattaattttaggacttccatttttcaaacaacattatgataagttagatatacatgattttattggagatagttttgcaacaccaagtgttaatgttaatttaattgaatatcatgatagacatatttctactattattaataataaagataatgattcatatctaatatatattaattcaatgaatgttgaatcctctgaagaaaatgatattaaaactattgataaagaaattaataatgttgaagttaataaatacagaaatgatattttagaaaaatttaatgatgttgttactatgaaagaaccaaatgaacttcctcctaaaagaaatcacgaacataaaattattttagttgaatctaataagcaagttaatagaaatcaatatcctttaagttattcagaaaaggaagaattaaccaaaactgttgataagttaatacaacaaaaatttattagaattagtgatagtccttataatagccctgttttatttgttaagaaaaaagatggaaccatgaggatgtgcattgattatagattgttgaataataacactgttaaagatagatttcctttacctcatatagaagaaattatttccaagtttgaatctgctgttgtttattccaaattagatttaatgtcaggttattatcaagtaagaatccaagaagaagatattccaaaaactgcttttagtactgattatggtcattatgaatgggttgttatgccttttggtcttactaatgctccagcaacttttcaacgtatgatgaatactatcttatccaaatatttgaatacatgtgtgcaagtttatttagatgatatttttatttattccaaatcttataagcaacattatgaagatattaaaagtgttttatctacattaagagaacatcatttaattgctaagaaatcaaagtgtgccttcttttacgatgaattaagatttttaggtcatgttattactaaaaatggaattaaaactgatccagataaaattgaaaaggttaaaaattggccaattccaactactgtcaaagaagctcaaatgtttataggtttaacttcatattatagacgttttatcaagaatcattctaagattgctgtaccaattcataaatttattaccaaagaatcaaaatgggaagatgaacaaactaatgcttttaatcaacttaaagacgctttaattaacagtcctattctagtacatccaaaatggaataatgattgtacttatgttgttcatactgatgcttgtggtagtgctttaggttatactttagaacaattagatgaaaatggtaaaacaagaggtacaattgcttatggttctaagaaattaataggagctcaattaaattatggtatttatgatagagaatttatggcagttgtagaagctttgaaaaattggagatattatttattaggtagacattttgttattgttactgatcataaaagtttaatttatctacgctatcaaaatttgattgattcaactagggttgcaagatggcttgattatttatcacaatatgattttgaaattcaatatgttgcaggtaaagataattctgccgcagatgctttaagtcgttatccatatgaaaaattgtctgttaaagatgctttagaagttaatcatattaaatttttaggtaattcaaatagaaattcaaataataatattcaaattaataatactgaagttactgttactacttttcctatgaatgatgaattaaagaatttaattattaaaggttataaaaaagataatgtacttgctgatgtttattcaactttgaaaaataaatctgaaattcctattcatttaaaccaccatattaaacattatcaacttaaaaatgatttactttattataaaacattattagaacaagattgcaatagattagttattcctcgttataatagtttacctcaaagatttattaaaaatgctcataataatcctacttctggtcattttggtccttggaaaacttatcaaactttaatggattcattattttggtttaatatgatgcctacaattaaaaggtattgcaatagatgcattgtttgtcaacaaaataacacttctactcagaaaactcaaggattatttcaaccattacctgttcctgaaggtagatggactgatgttacaatggattttgttactggtttgccaacaactacttcaaatcatgatatgattatggttattactgatagattttcaaaaatgtcacattttattccaactgtgaaaactttaactgctgaaggttgtgctaaattatttttagattattttcttaaacatcatggatttccaaaaagattaactagtgataaagatattaggtttatgaataaattttggtatactattcattttttctttggtgtttctttattgttttcaactactaatcatccacaaactgatggtcaaactgaaagagttaataaagttttaaatcaattattaagaaaacattgttcaaatgatcatttacactgggatgaatttttaccaatgtgtgaatttgcttataatagtacttaccatgattcaattaaatgttctccttttgaattagctataggatataaaccagattctatgaaaagtgttaatagttggaatttagatgataatagatatagtccaaatgctcaagaatatgctagacgtatgagattaactttaactcaagctcaagataatattgtacaagctcaaagattgaatgaaaaatatcataatagatcacatagatttcataattataaagttggtgattatattttattgcatcgtgatgcttttggtgcttttgctaaatattataaaattcaacctgcttattatggtccatttagattggtgaaaaaaattaatgataatgcttttgaagttgatttacctaagattaataaaaaggatagagtattaaatattaaaaattttcgtccatatgttcctccagtcgatttattatgtcgtccacctagaactaatgctgaaattttatcaagaattaatcaaatgtgtggtattgctggttttgatgaagaaaagaatacttttgatgtttattggagagattgtgatcctttacttgctacaactattactgctgatcaatttaatacggcttcggaatcacttcgtcatagtttatttcataatgccaagatgatttgtgctcatgagcaaattgtttaagtatttgatttaatttaattttaacatcagggacgatgtttcccaacagccggggtaatgtaagggaataaatacaagttgttcaataatatccacgtgaagattaggtaagctgattacgtaaagatgataagatggaaataggaattccgagatacggaggttcggagatgtcggagtaagaaaggaatgacttagattgaaattgaattaattatgataaggagtggtatgattgataaggaatagtttaattaactatattaaggaatggttaatattgtaatataaataagtatgatatcctgtataactttgtataactctcttctgagaggggacattaatcagagtattagttagagaacaatctactaattaataccaaccgtctcattgctactcgctgtctattacacaaataaaaggtccaacgagtaaacttattttatacttattacttccattacgtaattaagtattatccactatcttacatattttagtttacaaaaataagaagccgttctagtatagtggtaagtacgcatcgttgtggccgatgagacccaggttcgattcctgggagcggcacaggtttattttttatttttaaaaattgaagttgtattatttttccataactattttttttatgtttatgcttgtcgattaaaaacaggtaaataacaatataaaaaagaagatatacacgtgaagtttaaatatttaaagatttatttatacaaaacttaatttaagagtttagtaactttaccaattgcgatagtttgtccttgatctcttaatgtaaatctacctaattgttgataatcttcataagtttcaagacaaacaggttcactagtttctaaaattgcaatgattttcataccttgtttagcaaaagctggagctttcttagattttctattagtacctttttctaatttatgtaataattgaacgaaattaacttcttcaatagcagtatgaacatgcataacacatgaaaaacctgatgataaaatagatttaagttcaacaattgcaacttgagcttcaaatctagtaacggtatgaactggatgagagattgatgataaaacgtaaccagttgaaacatcttcttcttcaacattctttaatcttaatctgacttgttcaccacagaaagcagattcagcctcagcttcagtttcattatatatagttaaaacttcaacagaaactttatttggcatcattattaaacttgaaccttttttaatatgacctgattcaattttaccttcaataacggtacctaaatctttcattttaccagaaattggtaacatgaatggatcattaatttttctttgtgataatggcatattatctaaatattctaataatgaaggaccagtataccatggacaatctttctttggaactctatcctttaaacctgcacctgtgaaacctgagactggcataaagacgacatcttcctttgcataaccaacacctcttaagaaaagagataacttacttatacattcattatatctttcttctgaccaaccgacagttggatcatccatcttattaatgacaacaactaatttattaacaccttgtgttttagctaaaattgcatgttctcttgattgaccacctctttcgaatcccgcttcatactcaccctttcttgctgagataactaagacaccaatatcagcttgagatgcaccaccgatcatttcagagacatataatttatgacctggagcatctaaaatagtataacgtcttttgtcggtttcaaaatatgatttaccaacttcaatagttttaccatcatttctttcttctttattagtatccataatccaagataaataccaaccttgtctacctgcatcttttgcttctctttcatatttttcaacagtacgtttatcaactgcaccagttaagaataaaatattaccacccatagttgatttacctgcatcaacatgtcccataaaaataattgaaacatgatctttaccaccaaacatatcactaacaactgatggatcaattatatcttcttgttctgcaataaccgattgtgatttagaaattggagctgaagaaactggtgtagattctttagttgatggtttagattctgactttttagcttcaacttttggagtttcttccttaactgcttccttaacttcttcttttggtgcttcatcctttgaagtttcttccttagtttcttccttagtttcttctttagtttcttctttagtttcttccttcttcttaacagccaatttaacagtactggattttaagtttaattttaaaaccttcttttttggagcagcattaaccttttcttgttgttgcttttgaaattcatcaaagtttaagttttgagcaactggttcttcttgtgcttgattattgtagttattgttataattgttgttataattgttgttataattgttgttataattgttgttataattgttgttataattgttgttataattgttattgttatagttgttattattatagttgttgttataattatttctgttgttgtaattgttattataaccacctcttctgttattgttattattataattgttattatagttattattataattgttattgtattgttgttgttgttgttgatttggatcaaattgaggaacaaattgttggaaattcatatttggaacaaaagtgttagcagcatttggatcaaatgcaggtgcgtttaaattaacattttgaacaccttgagctaattgattaggatcaaatttattagcttgactatctggttgttgattaggatcagacattacttgtaaaaggtatagtatcaagatatatcaaggcaaaacttaaagttcaagatatgttcacaatagtatttaaaatttatttgttacactagattttgaatttccatgttgaaaaagtgaaatttgaaaaattttttttactactattttgcatagacgcatcgaccgcaaagctttaaaatccaccgacccatcgaccacgtaagttttacctctgtttcaaattgatttccaagaaggggaaaaccaaaacacatgaaattaatttgtttaataaaggaatccttgaataataatattttaagattgattccagatagatcagatttatttgtacttcacatactcttcttctgaaattgtgtgctttagttttaaccccttttttctttaaactgtaacaactaaattatggatccggaaacttatttaagtcagaattttgacccttcaaagctaacagtgcctaatcttagatcaatattggtagagcatgaagtttatttcgcatcaaatgcaaataaacaacaattagttcaaatattcaatgataccatcaaaccaagagctaaaactttattgaaaaaatatacaaaaggtttcgttaatccaatatcagataattcatttgatgaaaaagtgatacctgctaaacgtcaacttgaaccatctgtacatgtaccatccagttcatcatcatcattatcatcatctaatacagtcaaacctaaaaaggctataaagaaaataagaaagaataaaaatacttcattatccgatgattcaagtaattctttcctttcaatcgaaaaattcgaaattaatgaaaatgataatatattccttggttcaatagatgataaatccatacatattttaccacaaactaaatttgccgactcaaatagacaaagatctaaaacgccaactaaaaaaattcttgaaaattttgataattcaatcccatcaagtaaaaaattcaatgtggaaaatggtggcaatattattgatagtaaaaatgatagggaaattgaaatttcatttgataataataaagaaaatattaataatacaatcaatgaaaataaatttaaaactaacctatttgataataaaaatgatgatattgtcttaatagatgatatatacgaacaaaaaaatattacttcaactccgacagtagataagcttcaaggtccaacaaatattattaataatgaagctattaatgttgtatctgaaaataacgatggaaacaataaagaagttgatattgatgaatttgaatttggtgacgataaacttgatgatacagtagttaaaacttttgatgttaaatcattaacttcattagaggaagattatgaagatataagttttagcgataaatcaagagatgatgaaattgtttacgaaaaaattcttgataaaaatgatgataaagatgttaagcctgtaattgatattgttgaagcaattgaaactgagatacctaatgaaattatcattgaatcagaaaatcttaatgaaacttcaattgaaatacctaatacaaaacctaaaagatcattctttaaaagattttttctcaccacttttagtattttacttttaacaggttcaggttctatatactcattaagaaaactcgattctgaaacaggattttgtggtataaaatctgaacaaccagttgttaaatttaatctctggtcaaaactaccagaatcaatcaccaacaacttagacacaatgaaaccatatattggtgattttgaaaaatttgctattgataaacttgcaattggatgcaaaccatgtcctttgaatgctaaatgtgaatctgattcttataaatgtaattattcatatgttaaaaattatggaattgaatcattatatggattattaccattaagaggtaattgtgtttttgataccttaagagaacaaaaattatattatttatcacaatatactttaaaatatctgcatgaaaataatgcaaaaaagatatcattagaggaacttcatgattatctgctaatgactaaggaaacccaaataagtgatgaagaatttgaaaattattggaaatcatttgttgaatatgaattgaaaatgaattctgattttgaatttaatgtaaatacaaatgagattaccattagtcatataataccaaccgagtattcaactagaagttttgtcaatgaacaaaataaaagacataaaaccaataagttattttcacaacatccaccaactgatgatttgaaaaaacatttgacaataaatatctaatttgcttttctagtgtagtttgtttctattttgttttatttttatataatgattttatagctttaataaattttagtgtattaaaaaataataaatagaattacaaaaggggaggtggggaacatttttgaaggttatatagtaatctaagagataatatcggacacagcagtggttacaggttcagtaatttgttcggaaataggttcagaaacaatttcagaaacaggttcggaggttggttcagagatgggtgcaataggttcagcagtagattcaaaaactggttcagatgtgatattgtctaaagtgatattttctgaagtaatattttctgaagtgatattttctgaagtgatattttctgaagttatattttgaatggattcatttcctaaatcaataacttcaacaggtgcttcaataatttgtaaatcatcatttccattattaattctatttttcaaacgttcttctcttgattgtaaaatattactgttaccattatttcttgattctcttaatttttgtctcttctcagctctttgttgtgcggcttgttgtttaataatttcaaattctttcaatctttcctcttcttctaattttctctttctttctttttcttctaatcttgatgaacgttttctattagccattaacatttgcatttcaatatctctcttacgttgagcattctgttttctcttctttaaatcatgttgaataacaaaatcaacattagcttcaagaattttacttaaagtatattcatttgaagaagttttcttaccaaatgaggatttaagagttttaataagattatcatattgataaagaccagctgttaaacactcccaatgtatcatttcaggattcaattgatttaaatcattataaggatctttgaatttagaatcaaaatcagttttctttgaaggtatttcaattttcttaaattcccattttctaaggtaaactcttgcatcttgtaagataagatattcatactttaaatttttttcattatattggaatactggtgtaattcttaaatcaatatggggatgttcaaatttatcaacagttttcctaaaattagcatggctcttagtatttgatagcttaattaatgtgtatataacttcaattttttgctctaaggttaatgtagagtatgttagtataggagtgtcatcatcgtcatcattatcatcgtcatcaccattagaattagcattaaaattatccttcttaacgtcttcaactcctttaggaagaatcaattcgtaatctttatagatttgatcaacaaagaaatcaaattctgaatcaattgtaactaatttttgatttttcaaatgttggattagtttgattttcaaattatttatgaaagaaggaggagcaatacccaacaattcctcttccaaattttcaacatcgaaggcatcacttagtttaatgatatgcttaagtaaataaatccattgaactatataggaatatttatagttatttctaagagcagttagtctagcagcatatactggattctcaatcagaagtagcttaggagtcttcaaatactgagccttgacctcttcaggtacaatcttagagagagatacggcgggatgttcagacattgtctatattgtgcaaaggaaccttctagaaattatcgatggatataaaaatggggaatattaacatttaaacaccttaaaaaaacatgtaaataaacacgacaaaatcagtgtcataaacttgcgttacgtaatacgatctgaaactcgttaaatccgtaaaaaagcctaaaattaaattattaaccatcatgagaacttatagcttatttcctttttttccctttccttcttttcaaattgtatacatacatctctttcttttcctgtttttatatccctattactctaattatccatcaaatgcccgttataaagagatccctaactgatataacagatgatggtcatcatgaaatgaatttaccagtttcaaataaccctcataatgatttattccaatttatttccatcccaaatgtttcacaagaatcacttcaaaagactgaatctgttgatatggatatgaacccatctcattcttttaattctaataatttaaataatttatcaagtatgattaataataacaataacaataacaacaattcatctaataacataacaaatcatgcatctatttataactcttatgcaaatcctaattcttttgcaaatcctcacttaaccaattatttatatgatgataatagttataataatatttataccaataataatgatgataatatggataatgggtttaataatcaatgtttaaacacatcagaatttactatgaatcaacaaaataatcaaatattcccatcagatttccaattttctaataatagcaacactactactaataataataacaacattaatgaaggtatacctgatgatgatattttaatggttcctcaagataatttctatatttatgatcatcaagatcctcaatttgtacctgaaatgatgcaattggaattatcaaataaatcattccctcaatcaaatgaactaaatattttcaaaggtaatgatgttttatatgaattttccgatgatgatgatgaagatgatgatttagatttacaaaataaacttgatgatgatgatgaagaagaagatgaagatgatgacgacgatgatttcgaagatgatgatttatataacctcaatcaagataatagtccatctggtgcatctattttctctgctaataacaataatataactcctaccaatgataactatgtcaataatagcaacatcaataataacaatttcaacacgattaatatgagacctgaaacaatgatgtcaaataatgattcatttaacgaaaactccatttattcattaactgttccaaaccaactaaattcaaattcaacagacgtgtatcataattttccttctcctttttcaaattataataacatgaatgagaccagtttatattccagtgatgagaatgatatcccttctataagtatgaatgcattcagtaatgctattattgctcaaggtgacgaagacgacgatgaagaggacgatgatgatgatgatggcgaggacgatgatgaagatgatgaaaacgatgataatgattttgcaattgataacgattctgactcagaattaaataccccaagctcaaatgatcgtagatcttcagttaccgcagatacaacaccaataatcaaaaaggaaagatcttcatctttacgtccaactacaagacctaaaagattaagaagaaaatctcatatatctaatacccttcataacactacaccattaagaaaaccaagaaattcaacatctaattcagttaataatgatttttcaatcaatgatttagatgatcaagcagaggaacatgtttgtaatataccaaatcctaaaactggtaaaccatgtttgaaaaaattttcaagaccttatgatttagttagacatcaaaatacaattcatgcatcaaaaagatcattttatagatgtatgttctgtgaagatgatttaagacgaaaacatggtttagagagtgttaatgaaattgtcgtttcatgtaaatatagaaattctaatttttcaactgaaaattcacattctcatagttcaagctctcataatatcaaaaaagttaaatctggtgctctcgataattctggttacttaagtaataaaactttcagtcgttgcgatgcattaacaagacatctcagattcaggcatggtttaaacaatactcaagtcaatgatgcaatgaattttgccaaaaaaaatatagagttttatgataattaattaagtaatttacttgataattattttaattcgcaaatcttcaatactacaaaaaaataagtatcctccaatatcatatccatactattttacttttctaaatttttaattctatcctaatctcctcttttgaaacctttactttttttataatacaatttttttcataaatttttataataaactaactatcaatcttaaaaaaattttaacctttatttcttttaaataaaatacataacgaatatataatgttttgactataaaacagtttacctaatatggataattatttggctcactttcaacagtgtaaccttgagcttcttgaatttttgtttgctcctctaaatatggtagcaaaacatctttgaatttttcataccctctgtaagttttaacatcgtcatcccaacttaaaataccatctaataatcttttaggaatatatggttcttgacacattttggtcatcggtaagaaataagttctaatagtgaaaataatacaaccagttagtggtagtcttctaacactttgtctttctgaacgataataaacgttattaatatcgactgcagcgtcagcagtattccaaccaacttctttaatatcttctggaccaatcgatgaagaccaagcaacatcattatcagtttgaataaaataattgtttctaacaactggtttatcacaagttaatcttgaaaaaaatttctccattggtctcttcaatttttcatcatatttaggaacatcaccagtagtatgaattgcacttaaaggtaaattaattttatctcttaatctccaaaatcctgcaagcataattgcaccacctttaaggatatattgcccattttcgtcttctttcataattgcaatatcatcttgtaacattaatgctgccatttccattggatcttttttgaattcagattttggtatatcaataaattcaaaaacttcaccagtaactatattgttaatacccttttcagttttaacaaataattttggatatctagttggtaaaaaatttcttaattcaattaaagcttcaattgctgcatcccaaacttcatcttgtgtaccaattaattcatgtccacgttccttaattctttctaatttacgattatgatacttcatccactcattatctaactcaatccatgaagtccagtccatcgatcttatacccatggtaacaaaataagcatgcttgaaagctctatatggtaatggaacagtgtccttgattgaccaatttgcatattcttcaactggcggatactcaaacagttcttccttccatgtacccagttttctatttttattatcagcttccttaatactgactggtttaaactctcttgtaaatgatctattgtatattatcttacctttatatttttcaccctttgttccaattaaatgtaagcaatatgcaactatagaaataaatataattccaattaagatttgtggtgatgtgatggaaaaagttccatcacctactattgttggcatcatcattgtttagttaaataacaaatcaaaatagaaagatgatatttgttggattcagatatattggattatgattttattataaatagtattttaccttagagatggttatggtggatagcagaaaaatttcttatcagctgtacaaatttgcctaatccggtaattttaaccagcgataataaccaaaaatttactaatgaaggaattgaacccatccaccagtcaataatattagcttacaaaatacaaaatcatgtcattataataactgattcaatccttagaaaattgcgctcacactgctttaaatgtacagtagtctggttaatttaccgttttggggtattatatgaataaaaatatttcaagttggatgtttctctcgtaccatctttaaacatgcaattatactggaatgctaaccacttgtatatcttttctaggataagtttaccgccaaagtaactctctagatactttgagcatcccactgtagctatgcaataatcgaaacaccttaatgtacgttttgtcttaaattggcgaagctaaactatagttttcaggaaatattgtgagtcaacgtgagtttatgtactacgtggaaaaatcattctaatgttgctagtagaactttagtagaatgtttttttggttatttaaaaggtgtagaaattctagtaaaaaatattttatgcttacctataaatgagctacaaactctttgaaaactgaacagatgaaacatttcaagttgctgcacggtaatgagtgactattataggtggtttttcgcgtttttaaaaattaaatgttagtttttttttgtattggcttctatttttttgataatttagaaactaaggctactttaaaaaatcaaaaaacaaaaatgttaatcttttttaaaaattttaagtacttttaattgctaatttagcttaaaatattaacttaggcaacttgaaaagtttttaatttaatttctctactaatatatgttaaagtaaaaaagctaagtgacaataaaattaatcacgtgaaaagataacaaggaggctaaaatgagcttttgacacaactgtaagggaataaatacaagttgttcaataatatccacgtgaagattaggtaagctgattacgtaaagatgataagatggaaataggaattccgagatacggaggttcggagatgtcggagtaagaaaggaatgacttagattgaaattgaattaattatgataaggagtggtatgattgataaggaatagtttaattaactatattaaggaatggttaatattgtaatataaataagtatgatatcctgtataactttgtataactctcttctgagaggggacattaatcagagtattagttagagaacaatctactaattaataccaaccgtctcattgctactcgctgtctattacacaaataaaaggtccaacgagtaaacttattttatacttattacttccattacgtaattaagtattatccactatcttacatattttagtttacatttggtagcaccggctagtgtttgtgttcctaattaaatcaaattatattcatctattaattaaattaaatcaactaaaaatgtcatctgctaaagataagattaatgctttaaagcaacaaattaaggaaataaaattaactgaaaagaagaagaagaaagaattgtcaaagaaacattctatcaaacattcaaagaacgttattaaaaagaagaaacatattaaaccacctcttagaattatccattccgatcctgaaatgtctgattattcatttgatgatgctttttcctcagataattcccattctgataactccaattctgattctgatatttctgattccgatactgatactgatgatgataataaaacttctaaaaatgataaacttagttctaactttccaaaatttgatggttcttctactgatgataaaggcaaggaattctccactactgaagctcaacttaaagcaaaaacttggttatctaagttgcacgttaatttaattgataaaggtatttcaaaatcaagctgggctagaaaagctattgttaatctcgaaggtagagcatacaaatgggtagaacataaattagagaagaatccaaagtatttaaagatttcctgggaaagatttttacgtgatttcaaaaaagaattttgtcctgttattgaagatgatatgcatgctatggattacaagattctaacttttaaaatggttccaggaatgaaagtctctacatattctgatcaatttaaagaatatattcaagaattggattttgaagaatctactaaatttcaaatttcaagatatttacttggtttaacacctgaattgaaaaagatggtatcccaacaaaaacctcgtaccttgaatgctgctattcattatgcagaagattctgaagctattttgaatgatattgaagaagcaaaaccaaaaaatccttggatcaataatatcgaacatcaaactcctgttagacgctcttattctcgcccatatagagttaataaatataaacctggttatcataataagcaaagatttttcagaaacaaaagaccatttaaaaggtacaattcaaattttaccccaatcggtggtaatcgttccatgcatttttctcgtcctactaaactaaataataaactatctaataataataatactagttctttttcttatattgcacctccagtaagtattcaacccgaagttgatcatttaaatgtcgagaaggaagaaggtgatactgttgttaataattctcaaagggtgattccaagagatgagactattaagaagggtgattcctctgaagttaaattgttaaagggtgattccaaacaagaaacaaatagtccaactttaaacattccttcattacctgaaattttacatgttaatgctttgaatattgaaaatttacgaaaaatagatgtacaaattgataataaaaattccgcatcagcaattattgatactggatccaatacagatgctattactacaattttatgtgatgaactgttattatcaagcaagattagattatatgttgaaccaattagtgctattttagttaatgatactgttgatgctattggtgaactagatatagatattgatgttgatctatttaataatcctatcaaagaaaaaagaacatttttagttttgcaggcaaacaccaagaaattaattttaggacttccatttttcaaacaacattatgataagttagatatacatgattttattggagatagttttgcaacaccaagtgttaatgttaatttaattgaatatcatgatagacatatttctactattattaataataaagataatgattcatatctaatatatattaattcaatgaatgttgaatcctctgaagaaaatgatattaaaactattgataaagaaattaataatgttgaagttaataaatacagaaatgatattttagaaaaatttaatgatgttgttactatgaaagaaccaaatgaacttcctcctaaaagaaatcacgaacataaaattattttagttgaatctaataagcaagttaatagaaatcaatatcctttaagttattcagaaaaggaagaattaaccaaaactgttgataagttaatacaacaaaaatttattagaattagtgatagtccttataatagccctgttttatttgttaagaaaaaagatggaaccatgagaatgtgcattgattatagattgttgaataataacactgttaaagatagatttcctttacctcatatagaagaaattatttccaagtttgaatctgctgttgtttattccaaattagatttaatgtcaggttattatcaagtaagaatccaagaagaagatattccaaaaactgcttttagtactgattatggtcattatgaatgggttgttatgccttttggtcttactaatgctccagcaacttttcaacgtatgatgaatactatcttatccaaatatttgaatacatgtgtgcaagtttatttagatgatatttttatttattccaaatcttataagcaacattatgaagatattaaaagtgttttatctacattaagagaacatcatttaattgctaagaaatcaaagtgtgccttctttacgatgaattaagatttttaggtcatgttattactaaaaatggaattaaaactgatccagataaaattgaaaaggttaaaaattggccaattccaactactgtcaaagaagctcaaatgtttataggtttaacttcatattatagacgttttatcaagaatcattctaagattgctgtaccaattcataaatttattaccaaagaatcaaaatgggaagatgaacaaactaatgcttttaatcaacttaaagacgctttaattaacagtcctattctagtacatccaaaatggaataatgattgtacttatgttgttcatactgatgcttgtggtagtgctttaggttatactttagaacaattagatgaaaatggtaaaacaagaggtacaattgcttatggttctaagaaattaatagggagctca

SEQ ID NO: 25 - DNA, 26898 bp, Pichia kluyveri
  >NCYC246_000011F P_kluyveri_NCYC246_TS
atgcctgtctgagcgtcgtttccttcttgcgcaagcagagttgagaacaggctatgcctttttcgaaatggaacgtcgtggacgaagtgaactaaattattggaacgctttggccgccgaacttttaactaagctcgacctcagatcaggtaggaatacccgctgaacttaagcatatcaataagcggaggaaaagaaaccaacagggattgcctcagtagcggcgagtgaagcggcaagagctcagatttgaaatctcacctagtgtgcgagttgtaaattgcaggttggagtctcgggttagacgtgtgtgcaagtcccttggaacagggtgccactgagggtgagagccccgtatcgtgcatgtcgacacctgtgaggcccttctgacgagtcgagttgtttgggaatgcagctctaagtgggtggtaaattccatctaaggctaaatattggcgagagaccgatagcgaacaagtactgtgaaggaaagatgaaaagcactttgaaaagagagtgaaacagcacgtgaaattgttgaaagggaagggtattgggctcgacatgggatttacgcatcgttgcctctcgtgggcggcgctctgggtttttcctgggccagcatcggttttcgttgcaggataaggacaattggaatgtggctcctcggagtgttatagccttttgtagatgctgcgtatggggaccgagggctgcggcggactcgtttcgtctcggatgctggcacaacggcgcaataccgcccgtcttgaaacatggaccaaggagtctaacgtctatgcgagtgtttgggtgtaaaacccgtacgcgtaatgaaagtgaacgtaggtcggaccgctctctcgggggcgggcacgatcgaccgatcctgatgtttatcggatggatttgagtaagagcatagctgttgggacccgaaagatggtgaactatgcctgaatagggtgaagccagaggaaactctggtggaggctcgtagcggttctgacgtgcaaatcgatcgtcgaatttgggtataggggcgaaagactaatcgaaccatctagtagctggttcctgccgaagtttccctcaggatagcagaagctcgtatcagttttatgaggtaaagcgaatgattagacgtctcggggtcgaaatgaccttagcgtattctcaaactttaaatatgtaagaagtccctgttgctttattgaacgcggacgtttgaatgcagagcttttagtgggccatttttggtaagcagaactggcgatgcgggatgaaccgaacgcaaagttaaggtgccggaatgcacgctcatcagacaccacaaaaggtgttagttcatccagacagccggacggtggccatggaagtcggaatccgctaaggagtgtgtaacaactcaccggccgaatgaactagccctgaaaatggatggcgctcaagcgtgttacctatactttgccgccatggcgtgatgccttggcgagtaggcaggcgtgggggtttgtgacgaagccttgggcgtgagcctgggtcgaacggcccctagtgcagatcttggtggtagtagcaaatattcaaatgagaactttgaagactgaagtggggaaaggttccgcgtcaacagcagttggacgcgggttagtcgatcctaagagatggggaagctccgtttcaacgtgtgcaattctttgcaccaccatcgaaagggaatccggttaaaattccggaacttggatgtggattcttcacggcaacgtaacagaatgcggagacgccggcgggagccctgggaggagttttcttttcttcttaacagcttatcaccctggaattggtttatccggagagggggtcttatggctggaagagcgtcgcctttgtttgcgacgtccggtgcgcttgcgacggtccttgaaaatccgcaggaaggaatagttttcacgccaagtcgtactcataaccgcagcaggtctccaaggttaacagcctctagttgatagaataatgtagataagggaagtcggcaaaatagatccgtaacttcgggataaggattggctctaagggttgggtggatgtgcttcctgtgctggccatgcgtgctggcgctgcttcttcgggggcggtgctgctagctacgcttgcgcttgcggcctccacggttaacaaccaacttagaactggtacggacaaggggaatctgactgtctaattaaaacatagcattgcgatggtcagaaagtgatgttgacgcaatgtgatttctgcccagtgctctgaatgtcaaagtgaagaaattcaaccaagcgcgggtaaacggcgggagtaactatgactctcttaaggtagccaaatgcctcgtcatctaattagtgacgcgcatgaatggattaacgagattcccactgtccctatctactatctagcgaaaccacagccaagggaacgggcttggcagaatcagcggggaaagaagaccctgttgagcttgactctagtttgacattgtgaaaagacatagagggtgtagcataagtgggagctccggcgccagtgaaataccactacctttatcgtttttttacttattcaatgaagcggagctggtcttgacgaccacgttctagtgcgaaggcatcttgtgtgccgatccgggttgatgacattgtcaggtggggagtttggctggggcggcacatctgttaaacgataacgcagatgtcctaagggggactcatggagaacagaaatctccagtagaacaaaagggtaaaagtccccttgattttgattttcagtgtgaatacaaaccatgaaagtgtggcctatcgatcctttagtccctcggaatttgaggctagaggtgccagaaaagttaccacagggataactggcttgtggcagtcaagcgctcatagcgacattgctttttgattcttcgatgtcggctcttcctatcataccgaagcagaattcggtaagcgttggattgttcacccactaatagggaacgtgagctgggtttagaccgtcgtgagacaggttagttttaccctactgatgaatgttgtcgcaatagtaattgaacttagtacgagaggaaccgttcattcagataattggtttttgcggctgtctgagcagacactgccgcgaagctaccatctgctggataatggctgaacgcctctaagtcagaatccatgctagaacgcgacgattacttgccctcgcacatttgagaaggataagaataaggcacttgtgtcgcagaaccgtagtaggtcggcagcggtgcgcgtggcggaaaggctgcgtgtgcttgccggcggatggcaatgtcaggatgcgcgaggataaatcctttgcatacgacttagatgtacaacggggtattgtaagcagtagagtagccttgttgttacgatctgctgagattaagcctctgttgtccgatttgttgcttcggcggcgaagttgcagtttgcagatgcgagctgggtatttcggcgagatttggggatgccggcgtggccgggtggtgggcgatgctgttgggtgccattaattcctagtccgtggcttggtgtatggtatacgtgaggacgggggtggtggatttgggtcgatcgtctgggtaggcatattttacctgttttggacttaggattttttcaaataatgtcagacgggatttatgcttacgtaagggaggagagtggtagggtagggattattgattacataaggagaatagctatgatgtcagaggagattaagacttatgattacgtagtgtagtgattacataagacgtacagtggcccgcggagattaagacttatgattacgtagtgtagtgattacttaagatgtacagtggagattagtatagacctgtagacttgtgcttagttaattaagacttgattactgaattagttatgaagtggtgagcgcaataacacgtgagatgactccagtgattcaatcacgtgaataagtagaagtcaagacacagagtcatattaaagaaccaaagagaagaagagtcagagggagttgactctggagaaagaatcacgtgcggacagaggggtttggggaaaaaagggctgggaacgtcccaaagaggcaagtgacgcacagaaattagggaaatatggtggtgaaaaattttcactgcacggctgtagcacgaaaattagtatgtagagacgcaacgacccgaaaaaagagctaaaaagtaaaaaacgcactttttggaaattattaagaaagtaatttattttacacctagaggtcaaaatatgggatttttgactaactttgaacgcttatatctggacaaccagagcaggtatgcactagtgtagggtatgggtgtgaagcctgaatttttgtgcgcatgtaggtatatgtagtgtgtagaatgactgcgggagtaagaagatagtaaacagaaggtgataacggacataaccaaaagacaacgaaagtggtgtcgtggcggcttggcgtggcggctcagcacactgatagcggctcagcagcgtacgataagaaaaaagtcgaggggctcgtgagaaaaaacaattttttcgactcgacgaaaagtggaaaaatgtggcggtggcgggtggcggtgcaggcagtagtggcgcatgcggtgcctgtggcgcagcggaaaattgggttcggaaaattggcgcgcgtggtgaaaagtgacgagcctccgcaaaattgggttcggaaatttgagaaatttttgaaagtgacgagcctccggaattttgggttcggaaatttggcgagaaattctgaaaaagatgagcctccgtaaaaaagtgacgagcctccgcaaaattgggttcggaaaattggcgagaaattctgaaaaagatgagcctccgtaaaaaagtgacgagcctccacgagagaaatgcgccgcaaaaaataatacgcaatacgccacaggaaaatacactactatgaaaaatactatgaaaaaaaaagattgcagcacctgagtttcgcatatggtctcccactacactactcggtcaggctcttagcagcttaactacagttgatcggacgggaaacggtgctttctgctagatatggccgcaaccgacagtgttcgatttcgggcggtattatggatgtcaaaatgaaaaaggccttttttctcgggctacagacgtgctgaggacacgagacccagtgcgttggaatcggattgttcaggagtatctgtgtaaattttatggaggcaaaagaaggggtgaaaatatgattttttatttttcatgggaggtaagtgaagaatttcattgggaatatgtgtgttgatggatgtactagttggaagaagtattttttatgttgttttttttgactttttagagttggatgggcaacagagagcgtagaatatagtggtaaagatttaacatgggcatattttagcgtattggaggagttagaagggtaaagtgtgatatgggtacaacagggagggtgtaataaaaaacaaagtatgttctttttgatgatattatatgcttgatgtggagatccagtggtgtttattatgaaataaaattatcaaagcgaaagacgcactggttgtggagaaataaataggtgaagttagtagagtgccaagttcaacagtgaatatctcgacaaccacgccagctagagacatgccttgtagatagttttgatcagcgtgttttactctctaggagcagtgtttaacatgggcataatggaaattggccaaaaccaaagttcatctggagagaagtggtttcatgggcaagttgactgggagtgcccagtggagctgtgcccagtgaagaggcccttcgtgggcaagcagacaaattgtgtgagtacttggctggaaattttggcaaagtgagaaaaatgcacagcgagggtgttcactggggagttgcccagtagacattttttcatgggcagctgccgggtagaaacccaatatgagaaatttcaaaatcactaagtcaggattctgagagtggtaggaggtacaagaggccagggagagtagagaacagagattggaattggaaaatccggcctgagaggggagttacggggggtgttggtattgttgcccagtgaagtgggaatttcgtgggaagtagactgtgagagttttgaattttttttaaattttgagattcgctgggaagattgaaagtttttgtcgggcaagtattacattccatgggcagtgcccagtgaaggaaaacacacatcaaaatttcctagtttctgtcctattgcttagttacaaagatatgttgatcaggatgctctgtatagtgtgccatgtaattatgaaggtgtaggaaggcatattgggcaagtttgcaaaatgggatttgttagaaatgcatgcacggctgacggctcagcagcattgacaaaaagaaaaacttcacctcgcgctcgaaaacattgcacgccaaaacgaagtccaatttaactcctggacgccgcggccaacgcgcgctgcgaatttttggcaagattacgcagtccgggggatatacatgagaaaagcacttaaaaaatgcggttcttagcggtgttgtgcaccgataggccaagatcccacggagagtatgcaggggcgtctacggacaagcttgggtatggccggggacaagagacgcaagtcttggacaggggcattgtggtcttgcgaccgtggtgcgcactgacggggccggtgggttgctagctgatagccagcggaccactaggtttattggggacggggttggagatgtagccgtgcaaacgtgacatctgggaccactctccactgaagcggacgaagctgtactttgtacaggggacctccgttgaagaaagtcaaacagtgctatgtgtaggttaatccaatcatcataacaaaactcatctgagcgtagttatctggttgatcctgccagtagtcatatgcttgtctcaaagattaagccatgcatgtctaagtataagcattatacggtgaaactgcgaatggctcattaaatcagttatcgtttatttgatagttccgttctacatggataaccgtggaaaatctagagctaatacatgcgtaaagccccgacttcgggaggggtgtatttattagataaaaaatcaatgccctcgggccttttgatgattcataataacttttcgaagctcatggcctttgtgctggagctggttcattcaaatttctgccctatcaactttcgatggtaggatagaggcctaccatggttttcacgggtaacggggaataagggttcgattccggagagggagcctgagaaacggctaccacatccaaggaaggcagcaggcgcgcaaattacccaatcctgacacagggaggtagtgacaatatataacgatacagggccattggtcttgtaattggaatgagtacaatgtaaataccttaacgaggaacaattggagggcaagtctggtgccagcagccgcggtaattccagctccaatagcgtatattaaagttgttgcagttaaaaagctcgtagttgaactttgggcctgggcgggcggtctacctatggtaagtactgttgcggccgggtcttttccttctggctaactcttcggagtgaaccaggacgattactttgaggaaattagagtgttcaaagcaggcctttgctcggatatattagcatggaataatagaataggacgttatggttctattttgttggtttctaggaccatcgtaatgattaatagggacggtcgggggcatcagtattcagttgtcagaggtgaaattcttggattaactgaagactaactactgcgaaagcatttgccaaggacgttttcattaatcaagaacgaaagttaggggatcgaagatgatcagataccgtcgtagtcttaaccataaactatgccgactagggatcgggtggcgcttcttgcccactcggcaccttacgagaaatcaaagtctttgggttctggggggagtatggttgcaaggctgaaacttaaaggaattgacggaagggcaccaccaggagtggagcctgcggcttaatttgactcaacacggggaaactcaccaggtccagacgtaataaggattgacaagctagagacttctcttgatcttacgggtggtggtgcatggccgtttttagtccttggagtgatttgtctgcttaattgcgataacggacgagaccttaacctgctaaatagggctgcgagcatctgctcgtgggctcttcttagagggactatgggtttcaaacccatggaagtttgaggcaacaacaggtctgtgatgcccttagacgttctgggccgcacgcgcgctacactgacggagccagcaagtatatccttggtcgagaggcccgggtaatctcgtgaaactccgtcgtgctggggatagagcattgtaatttttgctcttcaacgaggaattcctagtaagcgcaagtcatcagcttgcgttgattacgtccctgccctttgtacacaccgcccgtcgctactaccgattgaatggcttagtgaggctccaagattggcgccgcgggaggggcaactttcccatggcgctgaaaattcagtcaaacttggtcatttagaggtcgtaaaagtcgtaacaaggtttccgtaggtgaacctgcggaaggatcattactgtgatttatatcttatacacatgcgtgagcgcaccaaacacctaaaattgtaataataccagtcactaagttttaacaaaacaaaactttcaacaacggatctcttggttctcgcatcgatgaagagcgcagcgaaatgcgatacctagtgtgaattgcagccatcgtgaatcatcgagttcttgaacgcacattgcgccccatggtattccatggggcatgcctgtctgagcgtcgtttccttcttgcgcaagcagagttgagaacaggctatgcctttttcgaaatggaacgtcgtggacgaagtgaactaaattattggaacgctttggccgccgaacttttaactaagctcgacctcagatcaggtaggaatacccgctgaacttaagcatatcaataagcggaggaaaagaaaccaacagggattgcctcagtagcggcgagtgaagcggcaagagctcagatttgaaatctcacctagtgtgcgagttgtaaattgcaggttggagtctcgggttagacgtgtgtgcaagtcccttggaacagggtgccactgagggtgagagccccgtatcgtgcatgtcgacacctgtgaggcccttctgacgagtcgagttgtttgggaatgcagctctaagtgggtggtaaattccatctaaggctaaatattggcgagagaccgatagcgaacaagtactgtgaaggaaagatgaaaagcactttgaaaagagagtgaaacagcacgtgaaattgttgaaagggaagggtattgggctcgacatgggatttacgcatcgttgcctctcgtgggcggcgctctgggtttttcctgggccagcatcggttttcgttgcaggataaggacaattggaatgtggctcctcggagtgttatagccttttgtagatgctgcgtatggggaccgagggctgcggcggactcgtttcgtctcggatgctggcacaacggcgcaataccgcccgtcttgaaacatggaccaaggagtctaacgtctatgcgagtgtttgggtgtaaaacccgtacgcgtaatgaaagtgaacgtaggtcggaccgctctctcgggggcgggcacgatcgaccgatcctgatgtttatcggatggatttgagtaagagcatagctgttgggacccgaaagatggtgaactatgcctgaatagggtgaagccagaggaaactctggtggaggctcgtagcggttctgacgtgcaaatcgatcgtcgaatttgggtataggggcgaaagactaatcgaaccatctagtagctggttcctgccgaagtttccctcaggatagcagaagctcgtatcagttttatgaggtaaagcgaatgattagacgtctcggggtcgaaatgaccttagcgtattctcaaactttaaatatgtaagaagtccctgttgctttattgaacgcggacgtttgaatgcagagcttttagtgggccatttttggtaagcagaactggcgatgcgggatgaaccgaacgcaaagttaaggtgccggaatgcacgctcatcagacaccacaaaaggtgttagttcatccagacagccggacggtggccatggaagtcggaatccgctaaggagtgtgtaacaactcaccggccgaatgaactagccctgaaaatggatggcgctcaagcgtgttacctatactttgccgccatggcgtgatgccttggcgagtaggcaggcgtgggggtttgtgacgaagccttgggcgtgagcctgggtcgaacggcccctagtgcagatcttggtggtagtagcaaatattcaaatgagaactttgaagactgaagtggggaaaggttccgcgtcaacagcagttggacgcgggttagtcgatcctaagagatggggaagctccgtttcaacgtgtgcaattctttgcaccaccatcgaaagggaatccggttaaaattccggaacttggatgtggattcttcacggcaacgtaacagaatgcggagacgccggcgggagccctgggaggagttttcttttcttcttaacagcttatcaccctggaattggtttatccggagagggggtcttatggctggaagagcgtcgcctttgtttgcgacgtccggtgcgcttgcgacggtccttgaaaatccgcaggaaggaatagttttcacgccaagtcgtactcataaccgcagcaggtctccaaggttaacagcctctagttgatagaataatgtagataagggaagtcggcaaaatagatccgtaacttcgggataaggattggctctaagggttgggtggatgtgcttcctgtgctggccatgcgtgctggcgctgcttcttcgggggcggtgctgctagctacgcttgcgcttgcggcctccacggttaacaaccaacttagaactggtacggacaaggggaatctgactgtctaattaaaacatagcattgcgatggtcagaaagtgatgttgacgcaatgtgatttctgcccagtgctctgaatgtcaaagtgaagaaattcaaccaagcgcgggtaaacggcgggagtaactatgactctcttaaggtagccaaatgcctcgtcatctaattagtgacgcgcatgaatggattaacgagattcccactgtccctatctactatctagcgaaaccacagccaagggaacgggcttggcagaatcagcggggaaagaagaccctgttgagcttgactctagtttgacattgtgaaaagacatagagggtgtagcataagtgggagctccggcgccagtgaaataccactacctttatcgtttttttacttattcaatgaagcggagctggtcttgacgaccacgttctagtgcgaaggcatcttgtgtgccgatccgggttgatgacattgtcaggtggggagtttggctggggcggcacatctgttaaacgataacgcagatgtcctaagggggactcatggagaacagaaatctccagtagaacaaaagggtaaaagtccccttgattttgattttcagtgtgaatacaaaccatgaaagtgtggcctatcgatcctttagtccctcggaatttgaggctagaggtgccagaaaagttaccacagggataactggcttgtggcagtcaagcgctcatagcgacattgctttttgattcttcgatgtcggctcttcctatcataccgaagcagaattcggtaagcgttggattgttcacccactaatagggaacgtgagctgggtttagaccgtcgtgagacaggttagttttaccctactgatgaatgttgtcgcaatagtaattgaacttagtacgagaggaaccgttcattcagataattggtttttgcggctgtctgagcagacactgccgcgaagctaccatctgctggataatggctgaacgcctctaagtcagaatccatgctagaacgcgacgattacttgccctcgcacatttgagaaggataagaataaggcacttgtgtcgcagaaccgtagtaggtcggcagcggtgcgcgtggcggaaaggctgcgtgtgcttgccggcggatggcaatgtcaggatgcgcgaggataaatcctttgcatacgacttagatgtacaacggggtattgtaagcagtagagtagccttgttgttacgatctgctgagattaagcctctgttgtccgatttgttgcttcggcggcgaagttgcagtttgcagatgcgagctgggtatttcggcgagatttggggatgccggcgtggccgggtggtgggcgatgctgttgggtgccattaattcctagtccgtggcttggtgtatggtatacgtgaggacgggggtggtggatttgggtcgatcgtctgggtaggcatattttacctgttttggacttaggattttttcaaataatgtcagacgggatttatgcttacgtaagggaggagagtggtagggtagggattattgattacataaggagaatagctatgatgtcagaggagattaagacttatgattacgtagtgtagtgattacataagacgtacagtggcccgcggagattaagacttatgattacgtagtgtagtgattacttaagatgtacagtggagattagtatagacctgtagacttgtgcttagttaattaagacttgattactgaattagttatgaagtggtgagcgcaataacacgtgagatgactccagtgattcaatcacgtgaataagtagaagtcaagacacagagtcatattaaagaaccaaagagaagaagagtcagagggagttgactctggagaaagaatcacgtgcggacagaggggtttggggaaaaaagggctgggaacgtcccaaagaggcaagtgacgcacagaaattagggaaatatggtggtgaaaaattttcactgcacggctgtagcacgaaaattagtatgtagagacgcaacgacccgaaaaaagagctaaaaagtaaaaaacgcactttttggaaattattaagaaagtaatttattttacacctagaggtcaaaatatgggatttttgactaactttgaacgcttatatctggacaaccagagcaggtatgcactagtgtagggtatgggtgtgaagcctgaatttttgtgcgcatgtaggtatatgtagtgtgtagaatgactgcgggagtaagaagatagtaaacagaaggtgataacggacataaccaaaagacaacgaaagtggtgtcgtggcggcttggcgtggcggctcagcacactgatagcggctcagcagcgtacgataagaaaaaagtcgaggggctcgtgagaaaaaacaattttttcgactcgacgaaaagtggaaaaatgtggcggtggcgggtggcggtgcaggcagtagtggcgcatgcggtgcctgtggcgcagcggaaaattgggttcggaaaattggcgcgcgtggtgaaaagtgacgagcctccgcaaaattgggttcggaaatttgagaaatttttgaaagtgacgagcctccggaattttgggttcggaaatttggcgagaaattctgaaaaagatgagcctccgtaaaaaagtgacgagcctccgcaaaattgggttcggaaaattggcgagaaattctgaaaaagatgagcctccgtaaaaaagtgacgagcctccacgagagaaatgcgccgcaaaaaataatacgcaatacgccacaggaaaatacactactatgaaaaatactatgaaaaaaaaagattgcagcacctgagtttcgcatatggtctcccactacactactcggtcaggctcttagcagcttaactacagttgatcggacgggaaacggtgctttctgctagatatggccgcaaccgacagtgttcgatttcgggcggtattatggatgtcaaaatgaaaaaggccttttttctcgggctacagacgtgctgaggacacgagacccagtgcgttggaatcggattgttcaggagtatctgtgtaaattttatggaggcaaaagaaggggtgaaaatatgattttttatttttcatgggaggtaagtgaagaatttcattgggaatatgtgtgttgatggatgtactagttggaagaagtattttttatgttgttttttttgactttttagagttggatgggcaacagagagcgtagaatatagtggtaaagatttaacatgggcatattttagcgtattggaggagttagaagggtaaagtgtgatatgggtacaacagggagggtgtaataaaaaaacaagtatgttctttttgatgatattatatgcttgatgtggagatccagtggtgtttattatgaaataaaattatcaaagcgaaagacgcactggttgtggagaaataaataggtgaagttagtagagtgccaagttcaacagtgaatatctcgacaaccacgccagctagagacatgccttgtagatagttttgatcagcgtgttttactctctaggagcagtgtttaacatgggcataatggaaattggccaaaaccaaagttcatctggagagaagtggtttcatgggcaagttgactgggagtgcccagtggagctgtgcccagtgaagaggcccttcgtgggcaagcagacaaattgtgtgagtacttggctggaaattttggcaaagtgagaaaaatgcacagcgagggtgttcactggggagttgcccagtagacattttttcatgggcagctgccgggtagaaacccaatatgagaaatttcaaaatcactaagtcaggattctgagagtggtaggaggtacaagaggccagggagagtagagaacagagattggaattggaaaatccggcctgagaggggagttacggggggtgttggtattgttgcccagtgaagtgggaatttcgtgggaagtagactgtgagagttttgaattttttttaaattttgagattcgctgggaagattgaaagtttttgtcgggcaagtattacattccatgggcagtgcccagtgaaggaaaacacacatcaaaatttcctagtttctgtcctattgcttagttacaaagatatgttgatcaggatgctctgtatagtgtgccatgtaattatgaaggtgtaggaaggcatattgggcaagtttgcaaaatgggatttgttagaaatgcatgcacggctgacggctcagcagcattgacaaaaagaaaaacttcacctcgcgctcgaaaacattgcacgccaaaacgaagtccaatttaactcctggacgccgcggccaacgcgcgctgcgaatttttggcaagattacgcagtccgggggatatacatgagaaaagcacttaaaaaatgcggttcttagcggtgttgtgcaccgataggccaagatcccacggagagtatgcaggggcgtctacggacaagcttgggtatggccggggacaagagacgcaagtcttggacaggggcattgtggtcttgcgaccgtggtgcgcactgacggggccggtgggttgctagctgatagccagcggaccactaggtttattggggacggggttggagatgtagccgtgcaaacgtgacatctgggaccactctccactgaagcggacgaagctgtactttgtacaggggacctccgttgaagaaagtcaaacagtgctatgtgtaggttaatccaatcatcataacaaaactcatctgagcgtagttatctggttgatcctgccagtagtcatatgcttgtctcaaagattaagccatgcatgtctaagtataagcattatacggtgaaactgcgaatggctcattaaatcagttatcgtttatttgatagttccgttctacatggataaccgtggaaaatctagagctaatacatgcgtaaagccccgacttcgggaggggtgtatttattagataaaaaatcaatgccctcgggccttttgatgattcataataacttttcgaagctcatggcctttgtgctggagctggttcattcaaatttctgccctatcaactttcgatggtaggatagaggcctaccatggttttcacgggtaacggggaataagggttcgattccggagagggagcctgagaaacggctaccacatccaaggaaggcagcaggcgcgcaaattacccaatcctgacacagggaggtagtgacaatatataacgatacagggccattggtcttgtaattggaatgagtacaatgtaaataccttaacgaggaacaattggagggcaagtctggtgccagcagccgcggtaattccagctccaatagcgtatattaaagttgttgcagttaaaaagctcgtagttgaactttgggcctgggcgggcggtctacctatggtaagtactgttgcggccgggtcttttccttctggctaactcttcggagtgaaccaggacgattactttgaggaaattagagtgttcaaagcaggcctttgctcggatatattagcatggaataatagaataggacgttatggttctattttgttggtttctaggaccatcgtaatgattaatagggacggtcgggggcatcagtattcagttgtcagaggtgaaattcttggattaactgaagactaactactgcgaaagcatttgccaaggacgttttcattaatcaagaacgaaagttaggggatcgaagatgatcagataccgtcgtagtcttaaccataaactatgccgactagggatcgggtggcgcttcttgcccactcggcaccttacgagaaatcaaagtctttgggttctggggggagtatggttgcaaggctgaaacttaaaggaattgacggaagggcaccaccaggagtggagcctgcggcttaatttgactcaacacggggaaactcaccaggtccagacgtaataaggattgacaagctagagacttctcttgatcttacgggtggtggtgcatggccgtttttagtccttggagtgatttgtctgcttaattgcgataacggacgagaccttaacctgctaaatagggctgcgagcatctgctcgtgggctcttcttagagggactatgggtttcaaacccatggaagtttgaggcaacaacaggtctgtgatgcccttagacgttctgggccgcacgcgcgctacactgacggagccagcaagtatatccttggtcgagaggcccgggtaatctcgtgaaactccgtcgtgctggggatagagcattgtaatttttgctcttcaacgaggaattcctagtaagcgcaagtcatcagcttgcgttgattacgtccctgccctttgtacacaccgcccgtcgctactaccgattgaatggcttagtgaggctccaagattggcgccgcgggaggggcaactttcccatggcgctgaaaattcagtcaaacttggtcatttagaggtcgtaaaagtcgtaacaaggtttccgtaggtgaacctgcggaaggatcattactgtgatttatatcttatacacatgcgtgagcgcaccaaacacctaaaattgtaataataccagtcactaagttttaacaaaacaaaactttcaacaacggatctcttggttctcgcatcgatgaagagcgcagcgaaatgcgatacctagtgtgaattgcagccatcgtgaatcatcgagttcttgaacgcacattgcgccccatggtattccatggggcatgcctgtctgagcgtcgtttccttcttgcgcaagcagagttgagaacaggctatgcctttttcgaaatggaacgtcgtggacgaagtgaactaaattattggaacgctttggccgccgaacttttaactaagctcgacctcagatcaggtaggaatacccgctgaacttaagcatatcaataagcggaggaaaagaaaccaacagggattgcctcagtagcggcgagtgaagcggcaagagctcagatttgaaatctcacctagtgtgcgagttgtaaattgcaggttggagtctcgggttagacgtgtgtgcaagtcccttggaacagggtgccactgagggtgagagccccgtatcgtgcatgtcgacacctgtgaggcccttctgacgagtcgagttgtttgggaatgcagctctaagtgggtggtaaattccatctaaggctaaatattggcgagagaccgatagcgaacaagtactgtgaaggaaagatgaaaagcactttgaaaagagagtgaaacagcacgtgaaattgttgaaagggaagggtattgggctcgacatgggatttacgcatcgttgcctctcgtgggcggcgctctgggtttttcctgggccagcatcggttttcgttgcaggataaggacaattggaatgtggctcctcggagtgttatagccttttgtagatgctgcgtatggggaccgagggctgcggcggactcgtttcgtctcggatgctggcacaacggcgcaataccgcccgtcttgaaacatggaccaaggagtctaacgtctatgcgagtgtttgggtgtaaaacccgtacgcgtaatgaaagtgaacgtaggtcggaccgctctctcgggggcgggcacgatcgaccgatcctgatgtttatcggatggatttgagtaagagcatagctgttgggacccgaaagatggtgaactatgcctgaatagggtgaagccagaggaaactctggtggaggctcgtagcggttctgacgtgcaaatcgatcgtcgaatttgggtataggggcgaaagactaatcgaaccatctagtagctggttcctgccgaagtttccctcaggatagcagaagctcgtatcagttttatgaggtaaagcgaatgattagacgtctcggggtcgaaatgaccttagcgtattctcaaactttaaatatgtaagaagtccctgttgctttattgaacgcggacgtttgaatgcagagcttttagtgggccatttttggtaagcagaactggcgatgcgggatgaaccgaacgcaaagttaaggtgccggaatgcacgctcatcagacaccacaaaaggtgttagttcatccagacagccggacggtggccatggaagtcggaatccgctaaggagtgtgtaacaactcaccggccgaatgaactagccctgaaaatggatggcgctcaagcgtgttacctatactttgccgccatggcgtgatgccttggcgagtaggcaggcgtgggggtttgtgacgaagccttgggcgtgagcctgggtcgaacggcccctagtgcagatcttggtggtagtagcaaatattcaaatgagaactttgaagactgaagtggggaaaggttccgcgtcaacagcagttggacgcgggttagtcgatcctaagagatggggaagctccgtttcaacgtgtgcaattctttgcaccaccatcgaaagggaatccggttaaaattccggaacttggatgtggattcttcacggcaacgtaacagaatgcggagacgccggcgggagccctgggaggagttttcttttcttcttaacagcttatcaccctggaattggtttatccggagagggggtcttatggctggaagagcgtcgcctttgtttgcgacgtccggtgcgcttgcgacggtccttgaaaatccgcaggaaggaatagttttcacgccaagtcgtactcataaccgcagcaggtctccaaggttaacagcctctagttgatagaataatgtagataagggaagtcggcaaaatagatccgtaacttcgggataaggattggctctaagggttgggtggatgtgcttcctgtgctggccatgcgtgctggcgctgcttcttcgggggcggtgctgctagctacgcttgcgcttgcggcctccacggttaacaaccaacttagaactggtacggacaaggggaatctgactgtctaattaaaacatagcattgcgatggtcagaaagtgatgttgacgcaatgtgatttctgcccagtgctctgaatgtcaaagtgaagaaattcaaccaagcgcgggtaaacggcgggagtaactatgactctcttaaggtagccaaatgcctcgtcatctaattagtgacgcgcatgaatggattaacgagattcccactgtccctatctactatctagcgaaaccacagccaagggaacgggcttggcagaatcagcggggaaagaagaccctgttgagcttgactctagtttgacattgtgaaaagacatagagggtgtagcataagtgggagctccggcgccagtgaaataccactacctttatcgtttttttacttattcaatgaagcggagctggtcttgacgaccacgttctagtgcgaaggcatcttgtgtgccgatccgggttgatgacattgtcaggtggggagtttggctggggcggcacatctgttaaacgataacgcagatgtcctaagggggactcatggagaacagaaatctccagtagaacaaaagggtaaaagtccccttgattttgattttcagtgtgaatacaaaccatgaaagtgtggcctatcgatcctttagtccctcggaatttgaggctagaggtgccagaaaagttaccacagggataactggcttgtggcagtcaagcgctcatagcgacattgctttttgattcttcgatgtcggctcttcctatcataccgaagcagaattcggtaagcgttggattgttcacccactaatagggaacgtgagctgggtttagaccgtcgtgagacaggttagttttaccctactgatgaatgttgtcgcaatagtaattgaacttagtacgagaggaaccgttcattcagataattggtttttgcggctgtctgagcagacactgccgcgaagctaccatctgctggataatggctgaacgcctctaagtcagaatccatgctagaacgcgacgattacttgccctcgcacatttgagaaggataagaataaggcacttgtgtcgcagaaccgtagtaggtcggcagcggtgcgcgtggcggaaaggctgcgtgtgcttgccggcggatggcaatgtcaggatgcgcgaggataaatcctttgcatacgacttagatgtacaacggggtattgtaagcagtagagtagccttgttgttacgatctgctgagattaagcctctgttgtccgatttgttgcttcggcggcgaagttgcagtttgcagatgcgagctgggtatttcggcgagatttggggatgccggcgtggccgggtggtgggcgatgctgttgggtgccattaattcctagtccgtggcttggtgtatggtatacgtgaggacgggggtggtggatttgggtcgatcgtctgggtaggcatattttacctgttttggacttaggattttttcaaataatgtcagacgggatttatgcttacgtaagggaggagagtggtagggtagggattattgattacataaggagaatagctatgatgtcagaggagattaagacttatgattacgtagtgtagtgattacataagacgtacagtggcccgcggagattaagacttatgattacgtagtgtagtgattacttaagatgtacagtggagattagtatagacctgtagacttgtgcttagttaattaagacttgattactgaattagttatgaagtggtgagcgcaataacacgtgagatgactccagtgattcaatcacgtgaataagtagaagtcaagacacagagtcatattaaagaaccaaagagaagaagagtcagagggagttgactctggagaaagaatcacgtgcggacagaggggtttggggaaaaaagggctgggaacgtcccaaagaggcaagtgacgcacagaaattagggaaatatggtggtgaaaaattttcactgcacggctgtagcacgaaaattagtatgtagagacgcaacgacccgaaaaaagagctaaaaagtaaaaaacgcactttttggaaattattaagaaagtaatttattttacacctagaggtcaaaatatgggatttttgactaactttgaacgcttatatctggacaaccagagcaggtatgcactagtgtagggtatgggtgtgaagcctgaatttttgtgcgcatgtaggtatatgtagtgtgtagaatgactgcgggagtaagaagatagtaaacagaaggtgataacggacataaccaaaagacaacgaaagtggtgtcgtggcggcttggcgtggcggctcagcacactgatagcggctcagcagcgtacgataagaaaaaagtcgaggggctcgtgagaaaaaacaattttttcgactcgacgaaaagtggaaaaatgtggcggtggcgggtggcggtgcaggcagtagtggcgcatgcggtgcctgtggcgcagcggaaaattgggttcggaaaattggcgcgcgtggtgaaaagtgacgagcctccgcaaaattgggttcggaaatttgagaaatttttgaaagtgacgagcctccggaattttgggttcggaaatttggcgagaaattctgaaaaagatgagcctccgtaaaaaagtgacgagcctccgcaaaattgggttcggaaaattggcgagaaattctgaaaaagatgagcctccgtaaaaaagtgacgagcctccacgagagaaatgcgccgcaaaaaataatacgcaatacgccacaggaaaatacactactatgaaaaatactatgaaaaaaaaagattgcagcacctgagtttcgcatatggtctcccactacactactcggtcaggctcttagcagcttaactacagttgatcggacgggaaacggtgctttctgctagatatggccgcaaccgacagtgttcgatttcgggcggtattatggatgtcaaaatgaaaaaggccttttttctcgggctacagacgtgctgaggacacgagacccagtgcgttggaatcggattgttcaggagtatctgtgtaaattttatggaggcaaaagaaggggtgaaaatatgattttttatttttcatgggaggtaagtgaagaatttcattgggaatatgtgtgttgatggatgtactagttggaagaagtattttttatgttgttttttttgactttttagagttggatgggcaacagagagcgtagaatatagtggtaaagatttaacatgggcatattttagcgtattggaggagttagaagggtaaagtgtgatatgggtacaacagggagggtgtaataaaaaacaaagtatgttctttttgatgatattatatgcttgatgtggagatccagtggtgtttattatgaaataaaattatcaaagcgaaagacgcactggttgtggagaaataaataggtgaagttagtagagtgccaagttcaacagtgaatatctcgacaaccacgccagctagagacatgccttgtagatagttttgatcagcgtgttttactctctaggagcagtgtttaacatgggcataatggaaattggccaaaaccaaagttcatctggagagaagtggtttcatgggcaagttgactgggagtgcccagtggagctgtgcccagtgaagaggcccttcgtgggcaagcagacaaattgtgtgagtacttggctggaaattttggcaaagtgagaaaaatgcacagcgagggtgttcactggggagttgcccagtagacattttttcatgggcagctgccgggtagaaacccaatatgagaaatttcaaaatcactaagtcaggattctgagagtggtaggaggtacaagaggccagggagagtagagaacagagattggaattggaaaatccggcctgagaggggagttacggggggtgttggtattgttgcccagtgaagtgggaatttcgtgggaagtagactgtgagagttttgaattttttttaaattttgagattcgctgggaagattgaaagtttttgtcgggcaagtattacattccatgggcagtgcccagtgaaggaaaacacacatcaaaatttcctagtttctgtcctattgcttagttacaaagatatgttgatcaggatgctctgtatagtgtgccatgtaattatgaaggtgtaggaaggcatattgggcaagtttgcaaaatgggatttgttagaaatgcatgcacggctgacggctcagcagcattgacaaaaagaaaaacttcacctcgcgctcgaaaacattgcacgccaaaacgaagtccaatttaactcctggacgccgcggccaacgcgcgctgcgaatttttggcaagattacgcagtccgggggatatacatgagaaaagcacttaaaaaatgcggttcttagcggtgttgtgcaccgataggccaagatcccacggagagtatgcaggggcgtctacggacaagcttgggtatggccggggacaagagacgcaagtcttggacaggggcattgtggtcttgcgaccgtggtgcgcactgacggggccggtgggttgctagctgatagccagcggaccactaggtttattggggacggggttggagatgtagccgtgcaaacgtgacatctgggaccactctccactgaagcggacgaagctgtactttgtacaggggacctccgttgaagaaagtcaaacagtgctatgtgtaggttaatccaatcatcataacaaaactcatctgagcgtagttatctggttgatcctgccagtagtcatatgcttgtctcaaagattaagccatgcatgtctaagtataagcattatacggtgaaactgcgaatggctcattaaatcagttatcgtttatttgatagttccgttctacatggataaccgtggaaaatctagagctaatacatgcgtaaagccccgacttcgggaggggtgtatttattagataaaaaatcaatgccctcgggccttttgatgattcataataacttttcgaagctcatggcctttgtgctggagctggttcattcaaatttctgccctatcaactttcgatggtaggatagaggcctaccatggttttcacgggtaacggggaataagggttcgattccggagagggagcctgagaaacggctaccacatccaaggaaggcagcaggcgcgcaaattacccaatcctgacacagggaggtagtgacaatatataacgatacagggccattggtcttgtaattggaatgagtacaatgtaaataccttaacgaggaacaattggagggcaagtctggtgccagcagccgcggtaattccagctccaatagcgtatattaaagttgttgcagttaaaaagctcgtagttgaactttgggcctgggcgggcggtctacctatggtaagtactgttgcggccgggtcttttccttctggctaactcttcggagtgaaccaggacgattactttgaggaaattagagtgttcaaagcaggcctttgctcggatatattagcatggaataatagaataggacgttatggttctattttgttggtttctaggaccatcgtaatgattaatagggacggtcgggggcatcagtattcagttgtcagaggtgaaattcttggattaactgaagactaactactgcgaaagcatttgccaaggacgttttcattaatcaagaacgaaagttaggggatcgaagatgatcagataccgtcgtagtcttaaccataaactatgccgactagggatcgggtggcgcttcttgcccactcggcaccttacgagaaatcaaagtctttgggttctggggggagtatggttgcaaggctgaaacttaaaggaattgacggaagggcaccaccaggagtggagcctgcggcttaatttgactcaacacggggaaactcaccaggtccagacgtaataaggattgacaagctagagacttctcttgatcttacgggtggtggtgcatggccgtttttagtccttggagtgatttgtctgcttaattgcgataacggacgagaccttaacctgctaaatagggctgcgagcatctgctcgtgggctcttcttagagggactatgggtttcaaacccatggaagtttgaggcaacaacaggtctgtgatgcccttagacgttctgggccgcacgcgcgctacactgacggagccagcaagtatatccttggtcgagaggcccgggtaatctcgtgaaactccgtcgtgctggggatagagcattgtaatttttgctcttcaacgaggaattcctagtaagcgcaagtcatcagcttgcgttgattacgtccctgccctttgtacacaccgcccgtcgctactaccgattgaatggcttagtgaggctccaagattggcgccgcgggaggggcaactttcccatggcgctgaaaattcagtcaaacttggtcatttagaggtcgtaaaagtcgtaacaaggtttccgtaggtgaacctgcggaaggatcattactgtgatttatatcttatacacatgcgtgagcgcaccaaacacctaaaattgtaataataccagtcactaagttttaacaaaacaaaactttcaacaacggatctcttggttctcgcatcgatgaagagcgcagcgaaatgcgatacctagtgtgaattgcagccatcgtgaatca

SEQ ID NO: 26 - DNA, 19335 bp, Pichia kluyveri
  >NCYC246_000012F P_kluyveri_NCYC246_TS
aacaatccaacgcttaccgaattctgcttcggtatgataggaagagccgacatcgaagaatcaaaaagcaatgtcgctatgagcgcttgactgccacaagccagttatccctgtggtaacttttctggcacctctagcctcaaattccgagggactaaaggatcgataggccacactttcatggtttgtattcacactgaaaatcaaaatcaaggggacttttacccttttgttctactggagatttctgttctccatgagtcccccttaggacatctgcgttatcgtttaacagatgtgccgccccagccaaactccccacctgacaatgtcatcaacccggatcggcacaagatgccttcgcactagaacgtggtcgtcaagaccagctccgcttcattgaataagtaaaaaaacgataaaggtagtggtatttcactggcgccggagctcccacttatgctacaccctctatgtcttttcacaatgtcaaactagagtcaagctcaacagggtcttctttccccgctgattctgccaagcccgttcccttggctgtggtttcgctagatagtagataggacagtgggaatctcgttaatccattcatgcgcgtcactaattagatgacgaggcatttggctaccttaagagagtcatagttactcccgccgtttacccgcgcttggttgaatttcttcactttgacattcagagcactgggcagaaatcacattgcgtcaacatcactttctgaccatcgcaatgctatgttttaattagacagtcagattccccttgtccgtaccagttctaagttggttgttaaccgtggaggccgcaagcgcaagcgtagctagcagcaccgcccccgaagaagcagcgccagcacgcatggccagcacaggaagcacatccacccaacccttagagccaatccttatcccgaagttacggatctattttgccgacttcccttatctacattattctatcaactagaggctgttaaccttggagacctgctgcggttatgagtacgacttggcgtgaaaactattccttcctgcggattttcaaggaccgtcgcaagcgcaccggacgtcgcaaacaaaggcgacgctcttccagccataagaccccctctccggataaaccaattccagggtgataagctgttaagaagaaaagaaaactcctcccagggctcccgccggcgtctccgcattctgttacgttgccgtgaagaatccacatccaagttccggaattttaaccggattccctttcgatggtggtgcaaagaattgcacacgttgaaacggagcttccccatctcttaggatcgactaacccgcgtccaactgctgttgacgcggaacctttccccacttcagtcttcaaagttctcatttgaatatttgctactaccaccaagatctgcactaggggccgttcgacccaggctcacgcccaaggcttcgtcacaaacccccacgcctgcctactcgccaaggcatcacgccatggcggcaaagtataggtaacacgcttgagcgccatccattttcagggctagttcattcggccggtgagttgttacacactccttagcggattccgacttccatggccaccgtccggctgtctggatgaactaacaccttttgtggtgtctgatgagcgtgcattccggcaccttaactttgcgttcggttcatcccgcatcgccagttctgcttaccaaaaatggcccactaaaagctctgcattcaaacgtccgcgttcaataaagcaacagggacttcttacatatttaaagtttgagaatacgctaaggtcatttcgaccccgagacgtctaatcattcgctttacctcataaaactgatacgagcttctgctatcctgagggaaacttcggcaggaaccagctactagatggttcgattagtctttcgcccctatacccaaattcgacgatcgatttgcacgtcagaaccgctacgagcctccaccagagtttcctctggcttcaccctattcaggcatagttcaccatctttcgggtcccaacagctatgctcttactcaaatccatccgataaacatcaggatcggtcgatcgtgcccgcccccgagagagcggtccgacctacgttcactttcattacgcgtacgggttttacacccaaacactcgcatagacgttagactccttggtccatgtttcaagacgggcggtattgcgccgttgtgccagcatccgagacgaaacgagtccgccgcagccctcggtccccatacgcagcatctacaaaaggctataacactccgaggagccacattccaattgtccttatcctgcaacgaaaaccgatgctggcccaggaaaaacccagagcgccgcccacgagaggcaacgatgcgtaaatcccatgtcgagcccaatacccttccctttcaacaatttcacgtgctgtttcactctcttttcaaagtgcttttcatctttccttcacagtacttgttcgctatcggtctctcgccaatatttagccttagatggaatttaccacccacttagagctgcattcccaaacaactcgactcgtcagaagggcctcacaggtgtcgacatgcacgatacggggctctcaccctcagtggcaccctgttccaagggacttgcacacacgtctaacccgagactccaacctgcaatttacaactcgcacactaggtgagatttcaaatctgagctcttgccgcttcactcgccgctactgaggcaatccctgttggtttcttttcctccgcttattgatatgcttaagttcagcgggtattcctacctgatctgaggtcgagcttagttaaaagttcggcggccaaagcgttccaataatttagttcacttcgtccacgacgttccatttcgaaaaaggcatagcctgttctcaactctgcttgcgcaagaaggaaacgacgctcagacaggcatgccccatggaataccatggggcgcaatgtgcgttcaagaactcgatgattcacgatggctgcaattcacactaggtatcgcatttcgctgcgctcttcatcgatgcgagaaccaagagatccgttgttgaaagttttgttttgttaaaacttagtgactggtattattacaattttaggtgtttggtgcgctcacgcatgtgtataagatataaatcacagtaatgatccttccgcaggttcacctacggaaaccttgttacgacttttacgacctctaaatgaccaagtttgactgaattttcagcgccatgggaaagttgcccctcccgcggcgccaatcttggagcctcactaagccattcaatcggtagtagcgacgggcggtgtgtacaaagggcagggacgtaatcaacgcaagctgatgacttgcgcttactaggaattcctcgttgaagagcaaaaattacaatgctctatccccagcacgacggagtttcacgagattacccgggcctctcgaccaaggatatacttgctggctccgtcagtgtagcgcgcgtgcggcccagaacgtctaagggcatcacagacctgttgttgcctcaaacttccatgggtttgaaacccatagtccctctaagaagagcccacgagcagatgctcgcagccctatttagcaggttaaggtctcgtccgttatcgcaattaagcagacaaatcactccaaggactaaaaacggccatgcaccaccacccgtaagatcaagagaagtctctagcttgtcaatccttattacgtctggacctggtgagtttccccgtgttgagtcaaattaagccgcaggctccactcctggtggtgcccttccgtcaattcctttaagtttcagccttgcaaccatactccccccagaacccaaagactttgatttctcgtaaggtgccgagtgggcaagaagcgccacccgatccctagtcggcatagtttatggttaagactacgacggtatctgatcatcttcgatcccctaactttcgttcttgattaatgaaaacgtccttggcaaatgctttcgcagtagttagtcttcagttaatccaagaatttcacctctgacaactgaatactgatgcccccgaccgtccctattaatcattacgatggtcctagaaaccaacaaaatagaaccataacgtcctattctattattccatgctaatatatccgagcaaaggcctgctttgaacactctaatttcctcaaagtaatcgtcctggttcactccgaagagttagccagaaggaaaagacccggccgcaacagtacttaccataggtagaccgcccgcccaggcccaaagttcaactacgagctttttaactgcaacaactttaatatacgctattggagctggaattaccgcggctgctggcaccagacttgccctccaattgttcctcgttaaggtatttacattgtactcattccaattacaagaccaatggccctgtatcgttatatattgtcactacctccctgtgtcaggattgggtaatttgcgcgcctgctgccttccttggatgtggtagccgtttctcaggctccctctccggaatcgaacccttattccccgttacccgtgaaaaccatggtaggcctctatcctaccatcgaaagttgatagggcagaaatttgaatgaaccagctccagcacaaaggccatgagcttcgaaaagttattatgaatcatcaaaaggcccgagggcattgattttttatctaataaatacacccctcccgaagtcggggctttacgcatgtattagctctagattttccacggttatccatgtagaacggaactatcaaataaacgataactgatttaatgagccattcgcagtttcaccgtataatgcttatacttagacatgcatggcttaatctttgagacaagcatatgactactggcaggatcaaccagataactacgctcagatgagttttgttatgatgattggattaacctacacatagcactgtttgactttcttcaacggaggtcccctgtacaaagtacagcttcgtccgcttcagtggagagtggtcccagatgtcacgtttgcacggctacatctccaaccccgtccccaataaacctagtggtccgctggctatcagctagcaacccaccggccccgtcagtgcgcaccacggtcgcaagaccacaatgcccctgtccaagacttgcgtctcttgtccccggccatacccaagcttgtccgtagacgcccctgcatactctccgtgggatcttggcctatcggtgcacaacaccgctaagaaccgcattttttaagtgcttttctcatgtatatcccccggactgcgtaatcttgccaaaaattcgcagcgcgcgttggccgcggcgtccaggagttaaattggacttcgttttggcgtgcaatgttttcgagcgcgaggtgaagtttttctttttgtcaatgctgctgagccgtcagccgtgcatgcatttctaacaaatcccattttgcaaacttgcccaatatgccttcctacaccttcataattacatggcacactatacagagcatcctgatcaacatatctttgtaactaagcaataggacagaaactaggaaattttgatgtgtgttttccttcactgggcactgcccatggaatgtaatacttgcccgacaaaaactttcaatcttcccagcgaatctcaaaatttaaaaaaaattcaaaactctcacagtctacttcccacgaaattcccacttcactgggcaacaataccaacaccccccgtaactcccctctcaggccggattttccaattccaatctctgttctctactctccctggcctcttgtacctcctaccactctcagaatcctgacttagtgattttgaaatttctcatattgggtttctacccggcagctgcccatgaaaaaatgtctactgggcaactccccagtgaacaccctcgctgtgcatttttctcactttgccaaaatttccagccaagtactcacacaatttgtctgcttgcccacgaagggcctcttcactgggcacagctccactgggcactcccagtcaacttgcccatgaaaccacttctctccagatgaactttggttttggccaatttccattatgcccatgttaaacactgctcctagagagtaaaacacgctgatcaaaactatctacaaggcatgtctctagctggcgtggttgtcgagatattcactgttgaacttggcactctactaacttcacctatttatttctccacaaccagtgcgtctttcgctttgataattttatttcataataaacaccactggatctccacatcaagcatataatatcatcaaaaagaacatactttgttttttattacaccctccctgttgtacccatatcacactttacccttctaactcctccaatacgctaaaatatgcccatgttaaatctttaccactatattctacgctctctgttgcccatccaactctaaaaagtcaaaaaaaacaacataaaaaatacttcttccaactagtacatccatcaacacacatattcccaatgaaattcttcacttacctcccatgaaaaataaaaaatcatattttcaccccttcttttgcctccataaaatttacacagatactcctgaacaatccgattccaacgcactgggtctcgtgtcctcagcacgtctgtagcccgagaaaaaaggcctttttcattttgacatccataataccgcccgaaatcgaacactgtcggttgcggccatatctagcagaaagcaccgtttcccgtccgatcaactgtagttaagctgctaagagcctgaccgagtagtgtagtgggagaccatatgcgaaactcaggtgctgcaatctttttttttcatagtatttttcatagtagtgtattttcctgtggcgtattgcgtattattttttgcggcgcatttctctcgtggaggctcgtcacttttttacggaggctcatctttttcagaatttctcgccaattttccgaacccaattttgcggaggctcgtcacttttttacggaggctcatttttcagaatttctcgccaaatttccgaacccaaaattccggaggctcgtcactttcaaaaatttctcaaatttccgaacccaattttgcggaggctcgtcacttttcaccacgcgcgccaattttccgaacccaattttccgctgcgccacaggcaccgcatgcgccactactgcctgcaccgccacccgccaccgccacatttttccacttttcgtcgagtcgaaaaaattgttttttctcacgagcccctcgacttttttcttatcgtacgctgctgagccgctatcagtgtgctgagccgccacgccaagccgccacgacaccactttcgttgtcttttggttatgtccgttatcaccttctgtttactatcttcttactcccgcagtcattctacacactacatatacctacatgcgcacaaaaattcaggcttcacacccataccctacactagtgcatacctgctctggttgtccagatataagcgttcaaagttagtcaaaaatcccatattttgacctctaggtgtaaaataaattactttcttaataatttccaaaaagtgcgttttttactttttagctcttttttcgggtcgttgcgtctctacatactaattttcgtgctacagccgtgcagtgaaaatttttcaccaccatatttccctaatttctgtgcgtcacttgcctctttgggacgttcccagcccttttttccccaaacccctctgtccgcacgtgattctttctccagagtcaactccctctgactcttcttctctttggttctttaatatgactctgtgtcttgacttctacttattcacgtgattgaatcactggagtcatctcacgtgttattgcgctcaccacttcataactaattcagtaatcaagtcttaattaactaagcacaagtctacaggtctatactaatctccactgtacatcttaagtaatcactacactacgtaatcataagtcttaatctccgcgggccactgtacgtcttatgtaatcactacactacgtaatcataagtcttaatctcctctgacatcatagctattctccttatgtaatcaataatccctaccctaccactctcctcccttacgtaagcataaatcccgtctgacattatttgaaaaaatcctaagtccaaaacaggtaaaatatgcctacccagacgatcgacccaaatccaccacccccgtcctcacgtataccatacaccaagccacggactaggaattaatggcacccaacagcatcgcccaccacccggccacgccggcatccccaaatctcgccgaaatacccagctcgcatctgcaaactgcaacttcgccgccgaagcaacaaatcggacaacagaggcttaatctcagcagatcgtaacaacaaggctactctactgcttacaataccccgttgtacatctaagtcgtatgcaaaggatttatcctcgcgcatcctgacattgccatccgccggcaagcacacgcagcctttccgccacgcgcaccgctgccgacctactacggttctgcgacacaagtgccttattcttatccttctcaaatgtgcgagggcaagtaatcgtcgcgttctagcatggattctgacttagaggcgttcagccattatccagcagatggtagcttcgcggcagtgtctgctcagacagccgcaaaaaccaattatctgaatgaacggttcctctcgtactaagttcaattactattgcgacaacattcatcagtagggtaaaactaacctgtctcacgacggtctaaacccagctcacgttccctattagtgggtgaacaatccaacgcttaccgaattctgcttcggtatgataggaagagccgacatcgaagaatcaaaaagcaatgtcgctatgagcgcttgactgccacaagccagttatccctgtggtaacttttctggcacctctagcctcaaattccgagggactaaaggatcgataggccacactttcatggtttgtattcacactgaaaatcaaaatcaaggggacttttacccttttgttctactggagatttctgttctccatgagtcccccttaggacatctgcgttatcgtttaacagatgtgccgccccagccaaactccccacctgacaatgtcatcaacccggatcggcacacaagatgccttcgcactagaacgtggtcgtcaagaccagctccgcttcattgaataagtaaaaaaacgataaaggtagtggtatttcactggcgccggagctcccacttatgctacaccctctatgtcttttcacaatgtcaaactagagtcaagctcaacagggtcttctttccccgctgattctgccaagcccgttcccttggctgtggtttcgctagatagtagatagggacagtgggaatctcgttaatccattcatgcgcgtcactaattagatgacgaggcatttggctaccttaagagagtcatagttactcccgccgtttacccgcgcttggttgaatttcttcactttgacattcagagcactgggcagaaatcacattgcgtcaacatcactttctgaccatcgcaatgctatgttttaattagacagtcagattccccttgtccgtaccagttctaagttggttgttaaccgtggaggccgcaagcgcaagcgtagctagcagcaccgcccccgaagaagcagcgccagcacgcatggccagcacaggaagcacatccacccaacccttagagccaatccttatcccgaagttacggatctattttgccgacttcccttatctacattattctatcaactagaggctgttaaccttggagacctgctgcggttatgagtacgacttggcgtgaaaactattccttcctgcggattttcaaggaccgtcgcaagcgcaccggacgtcgcaaacaaaggcgacgctcttccagccataagaccccctctccggataaaccaattccagggtgataagctgttaagaagaaaagaaaactcctcccagggctcccgccggcgtctccgcattctgttacgttgccgtgaagaatccacatccaagttccggaattttaaccggattccctttcgatggtggtgcaaagaattgcacacgttgaaacggagcttccccatctcttaggatcgactaacccgcgtccaactgctgttgacgcggaacctttccccacttcagtcttcaaagttctcatttgaatatttgctactaccaccaagatctgcactaggggccgttcgacccaggctcacgcccaaggcttcgtcacaaacccccacgcctgcctactcgccaaggcatcacgccatggcggcaaagtataggtaacacgcttgagcgccatccattttcagggctagttcattcggccggtgagttgttacacactccttagcggattccgacttccatggccaccgtccggctgtctggatgaactaacaccttttgtggtgtctgatgagcgtgcattccggcaccttaactttgcgttcggttcatcccgcatcgccagttctgcttaccaaaaatggcccactaaaagctctgcattcaaacgtccgcgttcaataaagcaacagggacttcttacatatttaaagtttgagaatacgctaaggtcatttcgaccccgagacgtctaatcattcgctttacctcataaaactgatacgagcttctgctatcctgagggaaacttcggcaggaaccagctactagatggttcgattagtctttcgcccctatacccaaattcgacgatcgatttgcacgtcagaaccgctacgagcctccaccagagtttcctctggcttcaccctattcaggcatagttcaccatctttcgggtcccaacagctatgctcttactcaaatccatccgataaacatcaggatcggtcgatcgtgcccgcccccgagagagcggtccgacctacgttcactttcattacgcgtacgggttttacacccaaacactcgcatagacgttagactccttggtccatgtttcaagacgggcggtattgcgccgttgtgccagcatccgagacgaaacgagtccgccgcagccctcggtccccatacgcagcatctacaaaaggctataacactccgaggagccacattccaattgtccttatcctgcaacgaaaaccgatgctggcccaggaaaaacccagagcgccgcccacgagaggcaacgatgcgtaaatcccatgtcgagcccaatacccttccctttcaacaatttcacgtgctgtttcactctcttttcaaagtgcttttcatctttccttcacagtacttgttcgctatcggtctctcgccaatatttagccttagatggaatttaccacccacttagagctgcattcccaaacaactcgactcgtcagaagggcctcacaggtgtcgacatgcacgatacggggctctcaccctcagtggcaccctgttccaagggacttgcacacacgtctaacccgagactccaacctgcaatttacaactcgcacactaggtgagatttcaaatctgagctcttgccgcttcactcgccgctactgaggcaatccctgttggtttcttttcctccgcttattgatatgcttaagttcagcgggtattcctacctgatctgaggtcgagcttagttaaaagttcggcggccaaagcgttccaataatttagttcacttcgtccacgacgttccatttcgaaaaaggcatagcctgttctcaactctgcttgcgcaagaaggaaacgacgctcagacaggcatgccccatggaataccatggggcgcaatgtgcgttcaagaactcgatgattcacgatggctgcaattcacactaggtatcgcatttcgctgcgctcttcatcgatgcgagaaccaagagatccgttgttgaaagttttgttttgttaaaacttagtgactggtattattacaattttaggtgtttggtgcgctcacgcatgtgtataagatataaatcacagtaatgatccttccgcaggttcacctacggaaaccttgttacgacttttacgacctctaaatgaccaagtttgactgaattttcagcgccatgggaaagttgcccctcccgcggcgccaatcttggagcctcactaagccattcaatcggtagtagcgacgggcggtgtgtacaaagggcagggacgtaatcaacgcaagctgatgacttgcgcttactaggaattcctcgttgaagagcaaaaattacaatgctctatccccagcacgacggagtttcacgagattacccgggcctctcgaccaaggatatacttgctggctccgtcagtgtagcgcgcgtgcggcccagaacgtctaagggcatcacagacctgttgttgcctcaaacttccatgggtttgaaacccatagtccctctaagaagagcccacgagcagatgctcgcagccctatttagcaggttaaggtctcgtccgttatcgcaattaagcagacaaatcactccaaggactaaaaacggccatgcaccaccacccgtaagatcaagagaagtctctagcttgtcaatccttattacgtctggacctggtgagtttccccgtgttgagtcaaattaagccgcaggctccactcctggtggtgcccttccgtcaattcctttaagtttcagccttgcaaccatactccccccagaacccaaagactttgatttctcgtaaggtgccgagtgggcaagaagcgccacccgatccctagtcggcatagtttatggttaagactacgacggtatctgatcatcttcgatcccctaactttcgttcttgattaatgaaaacgtccttggcaaatgctttcgcagtagttagtcttcagttaatccaagaatttcacctctgacaactgaatactgatgcccccgaccgtccctattaatcattacgatggtcctagaaaccaacaaaatagaaccataacgtcctattctattattccatgctaatatatccgagcaaaggcctgctttgaacactctaatttcctcaaagtaatcgtcctggttcactccgaagagttagccagaaggaaaagacccggccgcaacagtacttaccataggtagaccgcccgcccaggcccaaagttcaactacgagctttttaactgcaacaactttaatatacgctattggagctggaattaccgcggctgctggcaccagacttgccctccaattgttcctcgttaaggtatttacattgtactcattccaattacaagaccaatggccctgtatcgttatatattgtcactacctccctgtgtcaggattgggtaatttgcgcgcctgctgccttccttggatgtggtagccgtttctcaggctccctctccggaatcgaacccttattccccgttacccgtgaaaaccatggtaggcctctatcctaccatcgaaagttgatagggcagaaatttgaatgaaccagctccagcacaaaggccatgagcttcgaaaagttattatgaatcatcaaaaggcccgagggcattgattttttatctaataaatacacccctcccgaagtcggggctttacgcatgtattagctctagattttccacggttatccatgtagaacggaactatcaaataaacgataactgatttaatgagccattcgcagtttcaccgtataatgcttatacttagacatgcatggcttaatctttgagacaagcatatgactactggcaggatcaaccagataactacgctcagatgagttttgttatgatgattggattaacctacacatagcactgtttgactttcttcaacggaggtcccctgtacaaagtacagcttcgtccgcttcagtggagagtggtcccagatgtcacgtttgcacggctacatctccaaccccgtccccaataaacctagtggtccgctggctatcagctagcaacccaccggccccgtcagtgcgcaccacggtcgcaagaccacaatgcccctgtccaagacttgcgtctcttgtccccggccatacccaagcttgtccgtagacgcccctgcatactctccgtgggatcttggcctatcggtgcacaacaccgctaagaaccgcattttttaagtgcttttctcatgtatatcccccggactgcgtaatcttgccaaaaattcgcagcgcgcgttggccgcggcgtccaggagttaaattggacttcgttttggcgtgcaatgttttcgagcgcgaggtgaagtttttctttttgtcaatgctgctgagccgtcagccgtgcatgcatttctaacaaatcccattttgcaaacttgcccaatatgccttcctacaccttcataattacatggcacactatacagagcatcctgatcaacatatctttgtaactaagcaataggacagaaactaggaaattttgatgtgtgttttccttcactgggcactgcccatggaatgtaatacttgcccgacaaaaactttcaatcttcccagcgaatctcaaaatttaaaaaaaattcaaaactctcacagtctacttcccacgaaattcccacttcactgggcaacaataccaacaccccccgtaactcccctctcaggccggattttccaattccaatctctgttctctactctccctggcctcttgtacctcctaccactctcagaatcctgacttagtgattttgaaatttctcatattgggtttctacccggcagctgcccatgaaaaaatgtctactgggcaactccccagtgaacaccctcgctgtgcatttttctcactttgccaaaatttccagccaagtactcacacaatttgtctgcttgcccacgaagggcctcttcactgggcacagctccactgggcactcccagtcaacttgcccatgaaaccacttctctccagatgaactttggttttggccaatttccattatgcccatgttaaacactgctcctagagagtaaaacacgctgatcaaaactatctacaaggcatgtctctagctggcgtggttgtcgagatattcactgttgaacttggcactctactaacttcacctatttatttctccacaaccagtgcgtctttcgctttgataattttatttcataataaacaccactggatctccacatcaagcatataatatcatcaaaaagaacatactttgttttttattacaccctccctgttgtacccatatcacactttacccttctaactcctccaatacgctaaaatatgcccatgttaaatctttaccactatattctacgctctctgttgcccatccaactctaaaaagtcaaaaaaaacaacataaaaaatacttcttccaactagtacatccatcaacacacatattcccaatgaaattcttcacttacctcccatgaaaaataaaaaatcatattttcaccccttcttttgcctccataaaatttacacagatactcctgaacaatccgattccaacgcactgggtctcgtgtcctcagcacgtctgtagcccgagaaaaaaggcctttttcattttgacatccataataccgcccgaaatcgaacactgtcggttgcggccatatctagcagaaagcaccgtttcccgtccgatcaactgtagttaagctgctaagagcctgaccgagtagtgtagtgggagaccatatgcgaaactcaggtgctgcaattttttttcatagtatttttcatagtagtgtattttcctgtggcgtattgcgtattattttttgcggcgcatttctctcgtggaggctcgtcacttttttacggaggctcatctttttcagaatttctcgccaattttccgaacccaattttgcggaggctcgtcacttttttacggaggctcatctttttcagaatttctcgccaaatttccgaacccaaaattccggaggctcgtcactttcaaaaatttctcaaatttccgaacccaattttgcggaggctcgtcacttttcaccacgcgcgccaattttccgaacccaattttccgctgcgccacaggcaccgcatgcgccactactgcctgcaccgccacccgccaccgccacatttttccacttttcgtcgagtcgaaaaaattgttttttctcacgagcccctcgacttttttcttatcgtacgctgctgagccgctatcagtgtgctgagccgccacgccaagccgccacgacaccactttcgttgtcttttggttatgtccgttatcaccttctgtttactatcttcttactcccgcagtcattctacacactacatatacctacatgcgcacaaaaattcaggcttcacacccataccctacactagtgcatacctgctctggttgtccagatataagcgttcaaagttagtcaaaaatcccatattttgacctctaggtgtaaaataaattactttcttaataatttccaaaaagtgcgttttttactttttagctcttttttcgggtcgttgcgtctctacatactaattttcgtgctacagccgtgcagtgaaaatttttcaccaccatatttccctaatttctgtgcgtcacttgcctctttgggacgttcccagcccttttttccccaaacccctctgtccgcacgtgattctttctccagagtcaactccctctgactcttcttctctttggttctttaatatgactctgtgtcttgacttctacttattcacgtgattgaatcactggagtcatctcacgtgttattgcgctcaccacttcataactaattcagtaatcaagtcttaattaactaagcacaagtctacaggtctatactaatctccactgtacatcttaagtaatcactacactacgtaatcataagtcttaatctccgcgggccactgtacgtcttatgtaatcactacactacgtaatcataagtcttaatctcctctgacatcatagctattctccttatgtaatcaataatccctaccctaccactctcctcccttacgtaagcataaatcccgtctgacattatttgaaaaaatcctaagtccaaaacaggtaaaatatgcctacccagacgatcgacccaaatccaccacccccgtcctcacgtataccatacaccaagccacggactaggaattaatggcacccaacagcatcgcccaccacccggccacgccggcatccccaaatctcgccgaaatacccagctcgcatctgcaaactgcaacttcgccgccgaagcaacaaatcggacaacagaggcttaatctcagcagatcgtaacaacaaggctactctactgcttacaataccccgttgtacatctaagtcgtatgcaaaggatttatcctcgcgcatcctgacattgccatccgccggcaagcacacgcagcctttccgccacgcgcaccgctgccgacctactacggttctgcgacacaagtgccttattcttatccttctcaaatgtgcgagggcaagtaatcgtcgcgttctagcatggattctgacttagaggcgttcagccattatccagcagatggtagcttcgcggcagtgtctgctcagacagccgcaaaaaccaattatctgaatgaacggttcctctcgtactaagttcaattactattgcgacaacattcatcagtagggtaaaactaacctgtctcacgacggtctaaacccagctcacgttccctattagtgggtgaacaatccaacgcttaccgaattctgcttcggtatgataggaagagccgacatcgaagaatcaaaaagcaatgtcgctatgagcgcttgactgccacaagccagttatccctgtggtaacttttctggcacctctagcctcaaattccgagggactaaaggatcgataggccacactttcatggtttgtattcacactgaaaatcaaaatcaaggggacttttacccttttgttctactggagatttctgttctccatgagtcccccttaggacatctgcgttatcgtttaacagatgtgccgccccagccaaactccccacctgacaatgtcatcaacccggatcggcacacaagatgccttcgcactagaacgtggtcgtcaagaccagctccgcttcattgaataagtaaaaaaacgataaaggtagtggtatttcactggcgccggagctcccacttatgctacaccctctatgtcttttcacaatgtcaaactagagtcaagctcaacagggtcttctttccccgctgattctgccaagcccgttcccttggctgtggtttcgctagatagtagatagggacagtgggaatctcgttaatccattcatgcgcgtcactaattagatgacgaggcatttggctaccttaagagagtcatagttactcccgccgtttacccgcgcttggttgaatttcttcactttgacattcagagcactgggcagaaatcacattgcgtcaacatcactttctgaccatcgcaatgctatgttttaattagacagtcagattccccttgtccgtaccagttctaagttggttgttaaccgtggaggccgcaagcgcaagcgtagctagcagcaccgcccccgaagaagcagcgccagcacgcatggccagcacaggaagcacatccacccaacccttagagccaatccttatcccgaagttacggatctattttgccgacttcccttatctacattattctatcaactagaggctgttaaccttggagacctgctgcggttatgagtacgacttggcgtgaaaactattccttcctgcggattttcaaggaccgtcgcaagcgcaccggacgtcgcaaacaaaggcgacgctcttccagccataagaccccctctccggataaaccaattccagggtgataagctgttaagaagaaaagaaaactcctcccagggctcccgccggcgtctccgcattctgttacgttgccgtgaagaatccacatccaagttccggaattttaaccggattccctttcgatggtggtgcaaagaattgcacacgtgaaacggagcttcccatctcttaggatcgacaaccgcgtccaatttgacgcaccttcccca
